(19) United States
(12) Patent Application Publication
(10) Pub. No.: US 2023/0399371 A1
(43) Pub. Date: Dec. 14, 2023

(54) IL-12 COMPOSITIONS AND METHODS OF USE THEREOF

(71) Applicant: Proviva Therapeutics (Hong Kong) Limited, Hong Kong (CN)

(72) Inventors: Zijuan LI, Shanghai (CN); Hongxing ZHOU, Bedford, MA (US)

(21) Appl. No.: 18/034,248

(22) PCT Filed: Oct. 28, 2021
(86) PCT No.: PCT/US2021/057005

§ 371 Date: Apr. 27, 2023

Related U.S. Application Data
(60) Provisional application No. 63/107,023, filed on Oct. 29, 2020.
(60) Provisional application No. 63/147,402, filed on Feb. 9, 2021.

(51) Int. Cl. C07K 14/54; C07K 16/28; A61P 35/00

(52) U.S. Cl. CPC C07K 14/5434; C07K 16/2827; A61P 35/00; C07K 2319/70; C07K 2317/522

(57) ABSTRACT

Provided are attenuated protein homodimers or heterodimers, comprising an immunoglobulin antigen binding domain (ABD), an IL-12A (p35) protein, and an IL-12B (p40) protein, among other optional features, and related pharmaceutical compositions and methods of use thereof.

### CROSS-REFERENCE TO RELATED APPLICATIONS

[0001] This application claims the benefit under 35 U.S.C. § 119(e) to U.S. Provisional Application No. 63/107,023, filed Oct. 29, 2020; and U.S. Provisional Application No. 63/147,402, filed Feb. 9, 2021, each of which is incorporated by reference in its entirety.

### STATEMENT REGARDING THE SEQUENCE LISTING

[0002] The Sequence Listing associated with this application is provided in text format in lieu of a paper copy, and is hereby incorporated by reference into the specification. The name of the text file containing the Sequence Listing is PRVA_011_02WO_ST25.txt. The text file is about 715 KB, created on Oct. 26, 2021, and is being submitted electronically via EFS-Web.

### BACKGROUND

### Technical Field

[0003] The present disclosure relates generally to attenuated protein homodimers or heterodimers, comprising an immunoglobulin antigen binding domain (ABD), an IL-12A (p35) protein, and an IL-12B (p40) protein, among other optional features, and related pharmaceutical compositions and methods of use thereof.

### Description of the Related Art

[0004] Interleukin-12 (IL-12) immunotherapy has potential in the treatment of diseases such as cancers and infectious diseases. However, there are certain problems associated with standard IL-12 therapies. For example, IL-12 therapies can have a short half-life in circulation, and have high potency towards a broad range of immune cells. Also, the effects of such IL-therapies are largely systemic, instead of being localized to target tissues, leading to reduced efficacy and increased adverse events (see, for example, Lasek et al., Cancer Immunol Immunother. 63:419-435, 2014).

[0005] Nonetheless, IL-12 therapies could be effective, and there is an unmet need in the art to overcome these and other drawbacks. Strategies remain to be developed in order to harness the therapeutic effects of IL-12 for treating patients with cancer, infection and other diseases with high efficacy and low adverse effects (see, for example, Tugues et al., Cell Death and Differentiation, 22: 237-246, 2015).

[0006] Embodiments of the present disclosure address these problems and more by providing an attenuated protein homodimers and heterodimers, comprising IL-12 that can be “activated” within or targeted to a disease tissue, for example, a cancer tissue or infected tissue.

### BRIEF SUMMARY

[0007] Embodiments of the present disclosure include an attenuated protein homodimer, comprising a first polypeptide and a second polypeptide, wherein:
[0008] the first and the second polypeptide comprise, in an N- to C-terminal orientation, a region of an immunoglobulin antigen binding domain (ABD), an IL-12A (p35) protein, a linker, and an IL-12B (p40) protein,
[0009] wherein the ABD specifically binds to a cell surface protein expressed on a cell, a plasma protein, or an extracellular matrix (ECM) protein, wherein the IL-12A protein of the first polypeptide is bound to the IL-12B protein of the second polypeptide, and wherein the IL-12B protein of the first polypeptide is bound to the IL-12A protein of the second polypeptide, wherein said binding partially masks a binding site of IL-12 protein(s) that otherwise binds to an IL-12Rβ1/IL-12Rβ2 receptor complex on the surface of an immune cell in vitro or in vivo and attenuates or reduces at least one IL-12 signaling activity of the homodimer relative to wild-type IL-12.

[0010] In certain embodiments, the cell surface protein is inducible and co-expressed on an immune cell with the IL-12Rβ1/IL-12Rβ2 receptor complex, or the plasma protein is selected from albumins, globulins, fibrinogens, and clotting factors, or the ECM protein is selected from collagens, elastins, fibronectin, and laminins. In certain embodiments, the cell surface protein is selected from Programmed cell death protein 1 (PD-1), Programmed death-ligand 1 (PD-L1), B7H3 (CD276), T cell immunoreceptor with Ig and ITIM domains (TIGIT), T-cell immunoglobulin and mucin-domain containing-3 (TIM-3), NKG2D, 4-1BB (CD137), CD3, CD4, CD8, CD25, CD70.

[0011] In certain embodiments, the ABD comprises a (i) variable heavy chain (VH) region and a CH1 region, and (ii) a variable light chain (VL) region and a CL region, optionally wherein the CH1 region and the CL region are bound together via a disulfide bond. In some embodiments, the C-terminus of the CH1 region is fused to the N-terminus of the p35 protein, optionally via a linker, and wherein the VL/CL region is a separate polypeptide chain that is bound to the VH/CH1 region via the disulfide bond. In certain embodiments, the C-terminus of the CL region is fused to the N-terminus of the p35 protein, optionally via a linker, and wherein the VH/CH1 region is a separate polypeptide chain that is bound to the VL/CL region via the disulfide bond.

[0012] In some embodiments, the first and second p35 proteins comprise, consist, or consist essentially of an amino acid sequence that is at least 80, 85, 90, 95, 98, or 100% identical to an amino acid sequence selected from Table S1, optionally wherein the p35 protein is a variant that comprises or retains an amino acid substitution at C74 and/or S197, as defined by the mature p35 sequence, optionally C74A or C74S and/or S197A.

[0013] In certain embodiments, the first and second p40 proteins comprise, consist, or consist essentially of an amino acid sequence that is at least 80, 85, 90, 95, 98, or 100% identical to an amino acid sequence selected from Table S2, optionally wherein the p40 protein is a variant that comprises or retains amino acid substitutions at any one or more of Y144, C177, C252, K258, S259, K260, R261, and/or D290, including combinations thereof, as defined by the mature p40 sequence, including any one or more of Y144F, C177A, C252S, K258Q, S259D, K260Q, R261D, and/or D290A, optionally a QDQD substitution at residues K258-R261.

[0014] In some embodiments, the linker is a flexible linker, optionally a stable or non-cleavable linker. In some embodiments, the linker is about 1-50, 1-40, 1-30, 1-20, 1-10, 1-5, 1-4, 1-3 amino acids in length, or about 1, 2, 3, 4, 5, 6, 7, 8, 9, 10, 11, 12, 13, 14, 15, 16, 17, 18, 19, 20, 21, 22, 23, 24, 25, 26, 27, 28, 29, 30, 31, 32, 33, 34, 35, 36, 37, 38, 39, 40, 41, 42, 43, 44, 45, 46, 47, 48, 49, 50 amino acids in length. In some embodiments, the linker is selected from Table L1 or Table L2.

[0015] In some embodiments, the immune cell is selected from one or more of a T cell, a B cell, a natural killer (NK) cell, a monocyte, and a macrophage. In some embodiments, the immune cell is an In some embodiments, the first polypeptide and the second polypeptide comprise, consist, or consist essentially of an amino acid sequence that is at least 80, 85, 90, 95, 98, or 100% identical to a sequence selected from Table S3, optionally wherein the attenuated proprotein homodimer comprises chains 3 and 4 selected from Table S3, optionally, wherein the VL/CL region is a separate polypeptide chain that is bound to the VH/CH1 region via the disulfide bond, or wherein the VH/CH1 region is a separate polypeptide chain that is bound to the VL/CL region via the disulfide bond.

[0016] In some embodiments, binding of the ABD to the cell surface protein increases binding (avidity) of the IL-12 protein(s) in the homodimer to the IL-12Rβ31/IL-12Rβ2 receptor complex on the surface of an immune cell in vitro or in vivo, and thereby increases at least one IL-12 signaling activity of the homodimer. In some embodiments, binding of the ABD to the cell surface protein increases binding (avidity) of the IL-12 protein(s) in the homodimer to the IL-12Rβ1/IL-12Rβ2 receptor complex by about or at least about 10%, 20%, 30%, 40%, 50%, 60%, 70%, 80%, 90%, 100%, 200%, 300%, 400%, 500%, 1000%, 2000%, 3000%, 4000%, or 5000% or more. In some embodiments, binding of the ABD to the cell surface protein increases at least one IL-12 signaling activity of the homodimer by about or at least about 10%, 20%, 30%, 40%, 50%, 60%, 70%, 80%, 90%, 100%, 200%, 300%, 400%, 500%, 1000%, 2000%, 3000%, 4000%, or 5000% or more. In some embodiments, the at least one IL-12 signaling activity is selected from one or more of stimulating growth and function of T cells, enhancing cytotoxic activity of NK cells and/or CD8+ T cells, stimulating production of interferon-γ (IFN-γ) and/or tumor necrosis factor-α (TNF-α), and inhibiting angiogenesis.

[0017] In some embodiments, the attenuated protein homodimer is substantially in homodimeric form in a physiological solution, or under physiological conditions, optionally in vivo conditions.

[0018] Certain embodiments include an attenuated protein heterodimer, comprising a first polypeptide and a second polypeptide, wherein:
[0019] (a) the first polypeptide comprises, in an N- to C-terminal orientation, a variable heavy chain (VH) region and a CH1 region, an optional linker, and an IL-12A (p35) protein, and the second polypeptide comprises, in an N- to C-terminal orientation, a variable light chain (VL) region and a CL region, an optional linker, and an IL-12B (p40) protein, wherein the p35 protein of the first polypeptide is bound to the p40 protein of the second polypeptide; or
[0020] (b) the first polypeptide comprises, in an N- to C-terminal orientation, a variable heavy chain (VH) region and a CH1 region, an optional linker, and an IL-12B (p40) protein, and the second polypeptide comprises, in an N- to C-terminal orientation, a variable light chain (VL) region and a CL region, an optional linker, and an IL-12A (35) protein, wherein the p40 protein of the first polypeptide is bound to the p35 protein of the second polypeptide,
[0021] wherein the CH1 region and the CL region of (a) or (b) are bound together via a disulfide bond to form an immunoglobulin antigen binding domain (ABD), wherein the ABD specifically binds to a cell surface protein expressed on a cell, a plasma protein, or an extracellular matrix (ECM) protein, and wherein at least one of the p35 and/or the p40 protein is a variant that has one or more amino acid alterations relative to a wild-type p35 or p40 sequence, and which has reduced binding affinity to a wild-type IL-12Rβ1/IL-12Rβ2 receptor complex on the surface of an immune cell in vitro or in vivo relative to that of the wild-type p35 and/or p40 sequence.

[0022] In some embodiments, the cell surface protein is inducible and co-expressed on the immune cell with the IL-12Rβ1/IL-12Rβ2 receptor complex, or the plasma protein is selected from albumins, globulins, fibrinogens, and clotting factors, or the ECM protein is selected from collagens, elastins, fibronectin, and laminins. In some embodiments, the cell surface protein is selected from Programmed cell death protein 1 (PD-1), Programmed death-ligand 1 (PD-L1), B7H3 (CD276), T cell immunoreceptor with Ig and ITIM domains (TIGIT), T-cell immunoglobulin and mucin-domain containing-3 (TIM-3), NKG2D, 4-1BB (CD137), CD3, CD4, CD8, CD25, and CD70.

[0023] In some embodiments, the p35 protein is a variant that has reduced binding affinity to wild-type IL-12Rβ1/IL-12Rβ2 receptor complex of about or at least about 2-fold, 5-fold, 10-fold, 50-fold, 100-fold, 1000-fold or more, relative to the binding affinity of the wild-type p35 sequence. In some embodiments, the p35 protein has an amino acid substitution at any one or more of Y167, E38, F39, P41, K128, F166, and/or D188, as defined by the mature p35 sequence, optionally selected from any one or more of:
[0024] a Y167A, Y167D, Y167E, Y167F, Y167G, Y167H, Y167I, Y167L, Y167N, Y167Q, Y167S, Y167T, or Y167V substitution;
[0025] a E38A, E38D, E38F, E38G, E38H, E38I, E38K, E38L, E38M, E38N, E38P, E38Q, E38R, E38S, E38T, E38V, or E38W substitution;
[0026] a F39A, F39D, F39E, F39G, F39H, F39I, F39K, F39L, F39M, F39N, F39P, F39Q, F39R, F39S, F39T, F39V, F39W, or F39Y substitution;
[0027] a P41A, P41D, P41E, P41F, P41G, P41H, P41I, P41K, P41L, P41M, P41N, P41Q, P41R, P41S, P41T, P41V, P41W, or P41Y substitution;
[0028] a K128A, K128D, K128E, K128F, K128G, K128H, K128I, K128L, K128M, K128N, K128P, K128Q, K128R, K128S, K128T, K128V, K128W, or K128Y substitution;
[0029] a F166A, F166D, F166E, F166G, F166H, F166I, F166K, F166L, F166M, F166N, F166P, F166Q, F166R, F166S, F166T, F166V, F166W, or F166Y substitution; and
[0030] a D188A substitution, including any combination of the foregoing.

[0031] In some embodiments, the p35 protein comprises, consists, or consists essentially of an amino acid sequence that is at least 80, 85, 90, 95, 98, or 100% identical to an amino acid sequence selected from Table S1, optionally wherein the p35 protein is a variant that comprises or retains the acid substitution at Y167, and/or comprises or retains an amino acid substitution at C74 and/or S197, as defined by the mature p35 sequence, optionally C74A or C74S and/or S197A.

[0032] In some embodiments, the p40 protein is a variant that has reduced binding affinity to wild-type IL-12Rβ1/IL-12Rβ2 receptor complex of about or at least about 2-fold, 5-fold, 10-fold, 50-fold, 100-fold, 1000-fold or more, relative to the binding affinity of the wild-type p40 sequence. In specific embodiments, the p40 protein has an amino acid substitution at any one or more of D18, E59, K99, and/or K264, as defined by the mature p40 sequence.

[0033] In some embodiments, the p40 protein comprises, consists, or consists essentially of an amino acid sequence that is at least 80, 85, 90, 95, 98, or 100% identical to an amino acid sequence selected from Table S2, optionally wherein the p40 protein is a variant that comprises or retains amino acid substitutions at any one or more of Y144, C177, C252, K258, 5259, K260, R261, and/or D290, including combinations thereof, as defined by the mature p40 sequence, including any one or more of Y144F, C177A, C252S, K258Q, S259D, K260Q, R261D, and/or D290A, optionally a QDQD substitution at residues K258-R261.

[0034] In some embodiments, the linker is a flexible linker, optionally a stable or non-cleavable linker. In some embodiments, the linker is about 1-50, 1-40, 1-30, 1-20, 1-10, 1-5, 1-4, 1-3 amino acids in length, or about 1, 2, 3, 4, 5, 6, 7, 8, 9, 10, 11, 12, 13, 14, 15, 16, 17, 18, 19, 20, 21, 22, 23, 24, 25, 26, 27, 28, 29, 30, 31, 32, 33, 34, 35, 36, 37, 38, 39, 40, 41, 42, 43, 44, 45, 46, 47, 48, 49, 50 amino acids in length. In some embodiments, the linker is selected from Table L1 or Table L2.

[0035] Certain attenuated protein heterodimers comprise four polypeptides selected from:
[0036] (i) two of the first and second polypeptides of (a); and
[0037] (ii) two of the first and second polypeptides of (b),
[0038] wherein the four polypeptides are bound together to form an attenuated protein tetramer, for example, wherein the linkers are about or less than about 1, 2, 3, 4, 5, 6, 7, 8, 9, or 10 amino acids in length.

[0039] In some embodiments, the immune cell is selected from one or more of a T cell, a B cell, a natural killer (NK) cell, a monocyte, and a macrophage. In some embodiments, the immune cell is an exhausted T cell or an exhausted NK cell. In some embodiments, the first polypeptide comprises, consists, or consists essentially of an amino acid sequence that is at least 80, 85, 90, 95, 98, or 100% identical to a sequence selected from Table S4, wherein the second polypeptide comprises, consists, or consists essentially of an amino acid sequence that is at least 80, 85, 90, 95, 98, or 100% identical to a sequence selected from Table S4.

[0040] In some embodiments, binding of the ABD to the cell surface protein increases binding (avidity) of the IL-12 protein(s) in the heterodimer to the IL-12Rβ1/IL-12Rβ2 receptor complex on the surface of the immune cell in vitro or in vivo, and thereby increases at least one IL-12 signaling activity of the heterodimer. In some embodiments, binding of the ABD to the cell surface protein increases binding (avidity) of the IL-12 protein(s) in the heterodimer to the IL-12Rβ31/IL-12Rβ2 receptor complex by about or at least about 10%, 20%, 30%, 40%, 50%, 60%, 70%, 80%, 90%, 100%, 200%, 300%, 400%, 500%, 1000%, 2000%, 3000%, 4000%, or 5000% or more. In some embodiments, binding of the ABD to the cell surface protein increases at least one IL-12 signaling activity of the heterodimer by about or at least about 10%, 20%, 30%, 40%, 50%, 60%, 70%, 80%, 90%, 100%, 200%, 300%, 400%, 500%, 1000%, 2000%, 3000%, 4000%, or 5000% or more. In some embodiments, the at least one IL-12 signaling activity is selected from one or more of stimulating growth and function of T cells, enhancing cytotoxic activity of NK cells and/or CD8+ T cells, stimulating production of interferon-γ (IFN-γ) and/or tumor necrosis factor-α (TNF-α), and inhibiting angiogenesis.

[0041] In some embodiments, the attenuated protein heterodimer is substantially in homodimeric form in a physiological solution, or under physiological conditions, optionally in vivo conditions.

[0042] Also included are one or more recombinant nucleic acid molecules encoding the first and second polypeptide of an attenuated protein homodimer described herein, and optionally the VL/CL region and/or the VH/CH1 region as a separate polypeptide chain, one or more vectors comprising the recombinant nucleic acid molecules, or one or more host cells comprising the one or more vectors.

[0043] Some embodiments include methods of producing an attenuated protein homodimer described herein, comprising culturing the one or more host cells described herein under culture conditions suitable for the expression of the attenuated protein homodimer, and isolating the attenuated protein homodimer from the culture.

[0044] Also included are or more recombinant nucleic acid molecules encoding the first and second polypeptide of an attenuated protein heterodimer described herein, one or more vectors comprising the recombinant nucleic acid molecules, or one or more host cells comprising the one or more vectors.

[0045] Certain embodiments include methods of producing an attenuated protein heterodimer described herein, comprising
[0046] (a) culturing the one or more host cells described herein under culture conditions suitable for the expression of the attenuated protein heterodimer, and isolating the attenuated protein heterodimer from the culture; or
[0047] (b) culturing a host cell of described herein that expresses the first polypeptide of the heterodimer, culturing a separate host cell described herein that expresses the second polypeptide of the heterodimer, isolating the first and second polypeptides from each separate host cell, and combining the first and second polypeptides to produce the attenuated protein heterodimer.

[0048] Certain embodiments include an isolated human IL-12A (p35) protein variant, which comprises, consists, or consists essentially of an amino acid sequence that is at least 80, 85, 90, 95, 98, or 100% identical to the amino acid sequence set forth in SEQ ID NO: 1 or 2, and which has an amino acid substitution at any one or more of E38, F39, P41, C74, K128, F166, Y167, S197, and/or D188, as defined by the mature p35 sequence. In some embodiments, the isolated human p35 protein variant has an amino acid substitution selected from any one or more of:
[0049] a Y167A, Y167D, Y167E, Y167F, Y167G, Y167H, Y167I, Y167L, Y167N, Y167Q, Y167S, Y167T, or Y167V substitution;
[0050] a E38A, E38D, E38F, E38G, E38H, E38I, E38K, E38L, E38M, E38N, E38P, E38Q, E38R, E38S, E38T, E38V, or E38W substitution;
[0051] a F39A, F39D, F39E, F39G, F39H, F39I, F39K, F39L, F39M, F39N, F39P, F39Q, F39R, F39S, F39T, F39V, F39W, or F39Y substitution;
[0052] a P41A, P41D, P41E, P41F, P41G, P41H, P41I, P41K, P41L, P41M, P41N, P41Q, P41R, P41S, P41T, P41V, P41W, or P41Y substitution;
[0053] a K128A, K128D, K128E, K128F, K128G, K128H, K128I, K128L, K128M, K128N, K128P, K128Q, K128R, K128S, K128T, K128V, K128W, or K128Y substitution;
[0054] a F166A, F166D, F166E, F166G, F166H, F166I, F166K, F166L, F166M, F166N, F166P, F166Q, F166R, F166S, F166T, F166V, F166W, or F166Y substitution; and
[0055] a D188A substitution, including any combination of the foregoing. In some embodiments, the isolated p35 protein variant has reduced binding affinity to wild-type IL-12Rβ1/IL-12Rβ2 receptor complex of about or at least about 2-fold, 5-fold, 10-fold, 50-fold, 100-fold, 1000-fold or more, relative to the binding affinity of the wild-type p35 sequence.

[0056] Certain embodiments include an isolated recombinant nucleic acid molecule encoding a human IL-12A (p35) protein variant described herein, a vector comprising the recombinant nucleic acid molecule, a host cell comprising the vector. Also included are methods of producing the human IL-12A (p35) protein variant described herein, comprising culturing the host cell under culture conditions suitable for the expression of the p35 protein variant, and isolating the p35 protein variant from the culture.

[0057] Particular embodiments include pharmaceutical compositions, comprising a pharmaceutically acceptable carrier and an attenuated protein homodimer described herein, an attenuated protein heterodimer described herein, an IL-12A (p35) protein variant described herein, or any combination thereof.

[0058] Also included are methods of treating disease in a subject, and/or a method of enhancing an immune response in a subject, comprising administering to the subject a therapeutically effective amount of the pharmaceutical composition described herein. In some embodiments, the disease is selected from one or more of a cancer, a viral infection, and an immune disorder.

[0059] In some embodiments, the cancer is a primary cancer or a metastatic cancer, and is selected from one or more of melanoma (optionally metastatic melanoma), kidney cancer (optionally renal cell carcinoma), pancreatic cancer, bone cancer, prostate cancer, small cell lung cancer, non-small cell lung cancer (NSCLC), mesothelioma, leukemia (optionally lymphocytic leukemia, chronic myelogenous leukemia, acute myeloid leukemia, or relapsed acute myeloid leukemia), multiple myeloma, lymphoma, hepatoma (hepatocellular carcinoma), sarcoma, B-cell malignancy, breast cancer, ovarian cancer, colorectal cancer, glioma, glioblastoma multiforme, meningioma, pituitary adenoma, vestibular schwannoma, primary CNS lymphoma, primitive neuroectodermal tumor (medulloblastoma), bladder cancer, uterine cancer, esophageal cancer, brain cancer, head and neck cancers, cervical cancer, testicular cancer, thyroid cancer, and stomach cancer.

[0060] In some embodiments, following administration, the attenuated protein homodimer or heterodimer is activated through binding of the ABD to the cell surface receptor on an immune cell in vivo, optionally in a tumor microenvironment, which increases binding (avidity) of the IL-12 protein(s) to the IL-12Rβ1/IL-12Rβ2 receptor complex on the surface of the immune cell, and thereby increases at least one IL-12 signaling activity. In some embodiments, the immune cell is selected from one or more of a T cell, a B cell, a natural killer cell, a monocyte, and a macrophage. In some embodiments, the immune cell is an exhausted T cell or an exhausted NK cell.

[0061] In some embodiments, administration of the attenuated protein homodimer or heterodimer increases an immune response in the subject by about or at least about 5, 10, 15, 20, 25, 30, 35, 40, 45, 50, 60, 70, 80, 90, 100, 200, 300, 400, 500, 600, 700, 800, 900, 1000, 2000% or more, relative to a control, optionally wherein the immune response is an anti-cancer or anti-viral immune response. In some embodiments, administration of the attenuated protein homodimer or heterodimer increases cell-killing in the subject by about or at least about 5, 10, 15, 20, 25, 30, 35, 40, 45, 50, 60, 70, 80, 90, 100, 200, 300, 400, 500, 600, 700, 800, 900, 1000, 2000% or more, relative to a control, optionally wherein the cell-killing is cancer cell-killing or virally-infected cell-killing.

[0062] In some embodiments, the viral infection is selected from one or more of human immunodeficiency virus (HIV), Hepatitis A, Hepatitis B, Hepatitis C, Hepatitis E, Caliciviruses associated diarrhoea, Rotavirus diarrhoea, Haemophilus influenzae B pneumonia and invasive disease, influenza, measles, mumps, rubella, Parainfluenza associated pneumonia, Respiratory syncytial virus (RSV) pneumonia, Severe Acute Respiratory Syndrome (SARS), Human papillomavirus, Herpes simplex type 2 genital ulcers, Dengue Fever, Japanese encephalitis, Tick-borne encephalitis, West-Nile virus associated disease, Yellow Fever, Epstein-Barr virus, Lassa fever, Crimean-Congo haemorrhagic fever, Ebola haemorrhagic fever, Marburg haemorrhagic fever, Rabies, Rift Valley fever, Smallpox, upper and lower respiratory infections, and poliomyelitis, optionally wherein the subject is HIV-positive.

[0063] In some embodiments, the immune disorder is selected from one or more of type 1 diabetes, vasculitis, and an immunodeficiency.

[0064] In some embodiments, the pharmaceutical composition is administered to the subject by parenteral administration. In specific embodiments, the parenteral administration is intravenous administration.

[0065] Also included is the use of a pharmaceutical composition described herein in the preparation of a medicament for treating a disease in a subject, and/or for enhancing an immune response in a subject. Particular embodiments include a pharmaceutical composition described herein for use in treating a disease in a subject, and/or for enhancing an immune response in a subject.

### BRIEF DESCRIPTION OF THE DRAWINGS

[0066] FIG. 1A is a ribbon presentation of a disulfide bounded heterodimeric human IL-12 structure (PDB: 1F45) through the binding of p35 and p40, and FIG. 1B is a schematic diagram of the p35 and p40 chains of IL-12.

[0067] FIG. 2 is a schematic diagram of wild-type IL-12 that is bound to IL-12 co-receptors on a cell surface. The IL-12 co-receptor is composed of IL-12Rβ1 and IL-12Rβ2 chains and signals through Jak2 and Tyk2, respectively, leading to phosphorylation of STAT4 and other STAT transcription factors.

[0068] FIG. 3 is a schematic diagram of an exemplary low-affinity IL-12 variant that is bound weakly to IL-12 co-receptors on a cell surface. The IL-12 variant (mutated at p35, p40, or both) has reduced binding affinity to IL-12 co-receptors, resulting in low or no signaling in the cells.

[0069] FIG. 4A is a schematic diagram of an antigen binding domain (ABD) fused to the exemplary low-affinity IL-12 variant of FIG. 3, illustrating the general principle that binding of the ABD to a different cell surface receptor on an IL-12 co-receptor-expressing cell limits the diffusive property of the low-affinity IL-12 variant, resulting in increased binding (avidity) to the IL-12 co-receptors and increased IL-12 signaling activity. FIG. 4B is a schematic diagram of an ABD fused to the exemplary low-affinity IL-12 variant of FIG. 3, illustrating the general principle that binding of the ABD to a non-IL-12 effector cell results in the presentation of multiple copies of IL-12 variants to an effector cells expressing IL-12 co-receptors. This mode of action increases binding of IL-12 variants to the IL-12 co-receptors by increasing binding avidity, and thereby increasing the IL-12 variant signaling activity.

[0070] FIG. 5A is a schematic of an exemplary attenuated protein homodimer, as described herein. The homodimeric binding between the p35 and p40 proteins on each separate chain attenuate the binding affinity of the homodimer to IL-12 co-receptors, relative to wild-type IL-12, and binding of the ABD to a cell surface receptor on an immune cell of interest results in increased binding (avidity) of the homodimer to the IL-12 co-receptors and increased IL-12 signaling activity. FIGS. 5B-5C are schematics of exemplary attenuated protein heterodimers, as described herein, which are composed of ABD regions fused to an exemplary low-affinity IL-12 variant. In FIG. 5B, the VH/CH1 regions of the ABD are fused to a P35 variant, the VL/CL regions are fused to a p40 variant, and the CH1/CL regions are bound by a disulfide bond. In FIG. 5C, the VL/CL regions of the ABD are fused to a P35 variant, the VH/CH1 regions are fused to a p40 variant, and the CH1/CL regions are bound by a disulfide bond. As above, binding of the ABD to a cell surface receptor on an immune cell of interest results in increased binding (avidity) of the heterodimer to the IL-12 co-receptors and increased IL-12 signaling activity. FIG. 5D and FIG. 5E are schematics of exemplary tetramers of the heterodimeric structures from FIG. 5B and FIG. 5C, respectively.

[0071] FIGS. 6A-6J show representative SDS-PAGE results of purified proteins. FIGS. 6A, 6C, 6E, 6G, and 6I show non-reducing SDS-PAGE results. FIGS. 6B, 6D, 6F, 6H, and 6J show reducing SDS-PAGE results. “M” on the figures represents the protein standard marker.

[0072] FIGS. 7A-7L show representative HPLC analysis results of purified proteins.

[0073] FIGS. 8A-8C show ELISA binding results of purified proteins to PD-L1 and/or B7H3.

[0074] FIGS. 9A-9S show the activity of exemplary IL-12-based protein homodimers and heterodimers relative to wild-type human IL-12, as measured by phosphorylation of STAT4 in preactivated human PBMCs.

[0075] FIGS. 10A-10D show the activity of exemplary IL-12-based protein homodimers and heterodimers relative to wild-type human IL-12, as measured by IFN-γ release in preactivated human PBMCs.

[0076] FIGS. 11A-11D show the activity of exemplary IL-12-based protein heterodimers relative to wild-type human IL-12, as measured by IFN-γ release in the NK92MI cell line.

### DETAILED DESCRIPTION

[0077] Unless defined otherwise, all technical and scientific terms used herein have the same meaning as commonly understood by those of ordinary skill in the art to which the disclosure belongs. Although any methods, materials, compositions, reagents, cells, similar or equivalent similar or equivalent to those described herein can be used in the practice or testing of the subject matter of the present disclosure, preferred methods and materials are described. All publications and references, including but not limited to patents and patent applications, cited in this specification are herein incorporated by reference in their entirety as if each individual publication or reference were specifically and individually indicated to be incorporated by reference herein as being fully set forth. Any patent application to which this application claims priority is also incorporated by reference herein in its entirety in the manner described above for publications and references.

[0078] Standard techniques may be used for recombinant DNA, oligonucleotide synthesis, and tissue culture and transformation (e.g., electroporation, lipofection). Enzymatic reactions and purification techniques may be performed according to manufacturer's specifications or as commonly accomplished in the art or as described herein. These and related techniques and procedures may be generally performed according to conventional methods well known in the art and as described in various general and more specific references that are cited and discussed throughout the present specification. Unless specific definitions are provided, the nomenclature utilized in connection with, and the laboratory procedures and techniques of, molecular biology, analytical chemistry, synthetic organic chemistry, and medicinal and pharmaceutical chemistry described herein are those well-known and commonly used in the art. Standard techniques may be used for recombinant technology, molecular biological, microbiological, chemical syntheses, chemical analyses, pharmaceutical preparation, formulation, and delivery, and treatment of patients.

[0079] For the purposes of the present disclosure, the following terms are defined below.

[0080] The articles “a” and “an” are used herein to refer to one or to more than one (i.e., to at least one) of the grammatical object of the article. By way of example, “an element” includes “one element”, “one or more elements” and/or “at least one element”.

[0081] By “about” is meant a quantity, level, value, number, frequency, percentage, dimension, size, amount, weight or length that varies by as much as 30, 25, 20, 15, 10, 9, 8, 7, 6, 5, 4, 3, 2 or 1% to a reference quantity, level, value, number, frequency, percentage, dimension, size, amount, weight or length.

[0082] The term “attenuated protein” refers to a protein or protein complex that comprises an active domain which has inherently reduced biological activity (for example, receptor binding affinity, signaling activity) relative to its corresponding wild-type protein or protein complex under comparable conditions.

[0083] The term “antigen” refers to a molecule or a portion of a molecule capable of being bound by a selective binding agent, such as an antibody, and additionally capable of being used in an animal to produce antibodies capable of binding to an epitope of that antigen. An antigen may have one or more epitopes. As used herein, the term “antigen” includes substances that are capable, under appropriate conditions, of inducing an immune response to the substance and of reacting with the products of the immune response. More broadly, the term “antigen” includes any substance to which an antibody binds, or for which antibodies are desired, regardless of whether the substance is immunogenic. For such antigens, antibodies can be identified by recombinant methods, independently of any immune response.

[0084] An “antagonist” refers to biological or chemical agent that interferes with or otherwise reduces the physiological action of another agent or molecule. In some instances, the antagonist specifically binds to the other agent or molecule. Included are full and partial antagonists.

[0085] An “agonist” refers to biological or chemical agent that increases or enhances the physiological action of another agent or molecule. In some instances, the agonist specifically binds to the other agent or molecule. Included are full and partial agonists.

[0086] As used herein, the term “amino acid” is intended to mean both naturally occurring and non-naturally occurring amino acids as well as amino acid analogs and mimetics. Naturally-occurring amino acids include the 20 (L)-amino acids utilized during protein biosynthesis as well as others such as 4-hydroxyproline, hydroxylysine, desmosine, isodesmosine, homocysteine, citrulline and ornithine, for example. Non-naturally occurring amino acids include, for example, (D)-amino acids, norleucine, norvaline, p-fluorophenylalanine, ethionine and the like, which are known to a person skilled in the art. Amino acid analogs include modified forms of naturally and non-naturally occurring amino acids. Such modifications can include, for example, substitution or replacement of chemical groups and moieties on the amino acid or by derivatization of the amino acid. Amino acid mimetics include, for example, organic structures which exhibit functionally similar properties such as charge and charge spacing characteristic of the reference amino acid. For example, an organic structure which mimics arginine (Arg or R) would have a positive charge moiety located in similar molecular space and having the same degree of mobility as the e-amino group of the side chain of the naturally occurring Arg amino acid. Mimetics also include constrained structures so as to maintain optimal spacing and charge interactions of the amino acid or of the amino acid functional groups. Those skilled in the art know or can determine what structures constitute functionally equivalent amino acid analogs and amino acid mimetics.

[0087] As used herein, a subject “at risk” of developing a disease, or adverse reaction may or may not have detectable disease, or symptoms of disease, and may or may not have displayed detectable disease or symptoms of disease prior to the treatment methods described herein. “At risk” denotes that a subject has one or more risk factors, which are measurable parameters that correlate with development of a disease, as described herein and known in the art. A subject having one or more of these risk factors has a higher probability of developing disease, or an adverse reaction than a subject without one or more of these risk factor(s).

[0088] “Biocompatible” refers to materials or compounds which are generally not injurious to biological functions of a cell or subject and which will not result in any degree of unacceptable toxicity, including allergenic and disease states.

[0089] The term “binding” refers to a direct association between two molecules, due to, for example, covalent, electrostatic, hydrophobic, and ionic and/or hydrogen-bond interactions, including interactions such as salt bridges and water bridges.

[0090] By “coding sequence” is meant any nucleic acid sequence that contributes to the code for the polypeptide product of a gene. By contrast, the term “non-coding sequence” refers to any nucleic acid sequence that does not directly contribute to the code for the polypeptide product of a gene.

[0091] Throughout this disclosure, unless the context requires otherwise, the words “comprise,” “comprises,” and “comprising” will be understood to imply the inclusion of a stated step or element or group of steps or elements but not the exclusion of any other step or element or group of steps or elements.

[0092] By “consisting of” is meant including, and limited to, whatever follows the phrase “consisting of.” Thus, the phrase “consisting of” indicates that the listed elements are required or mandatory, and that no other elements may be present. By “consisting essentially of” is meant including any elements listed after the phrase, and limited to other elements that do not interfere with or contribute to the activity or action specified in the disclosure for the listed elements. Thus, the phrase “consisting essentially of” indicates that the listed elements are required or mandatory, but that other elements are optional and may or may not be present depending upon whether or not they materially affect the activity or action of the listed elements.

[0093] The term “endotoxin free” or “substantially endotoxin free” relates generally to compositions, solvents, and/or vessels that contain at most trace amounts (e.g., amounts having no clinically adverse physiological effects to a subject) of endotoxin, and preferably undetectable amounts of endotoxin. Endotoxins are toxins associated with certain micro-organisms, such as bacteria, typically gram-negative bacteria, although endotoxins may be found in gram-positive bacteria, such as Listeria monocytogenes. The most prevalent endotoxins are lipopolysaccharides (LPS) or lipo-oligo-saccharides (LOS) found in the outer membrane of various Gram-negative bacteria, and which represent a central pathogenic feature in the ability of these bacteria to cause disease. Small amounts of endotoxin in humans may produce fever, a lowering of the blood pressure, and activation of inflammation and coagulation, among other adverse physiological effects.

[0094] Therefore, in pharmaceutical production, it is often desirable to remove most or all traces of endotoxin from drug products and/or drug containers, because even small amounts may cause adverse effects in humans. A depyrogenation oven may be used for this purpose, as temperatures in excess of 300° C. are typically required to break down most endotoxins. For instance, based on primary packaging material such as syringes or vials, the combination of a glass temperature of 250° C. and a holding time of 30 minutes is often sufficient to achieve a 3 log reduction in endotoxin levels. Other methods of removing endotoxins are contemplated, including, for example, chromatography and filtration methods, as described herein and known in the art.

[0095] Endotoxins can be detected using routine techniques known in the art. For example, the Limulus Amoebocyte Lysate assay, which utilizes blood from the horseshoe crab, is a very sensitive assay for detecting presence of endotoxin. In this test, very low levels of LPS can cause detectable coagulation of the limulus lysate due a powerful enzymatic cascade that amplifies this reaction.

[0096] Endotoxins can also be quantitated by enzyme-linked immunosorbent assay (ELISA). To be substantially endotoxin free, endotoxin levels may be less than about 0.001, 0.005, 0.01, 0.02, 0.03, 0.04, 0.05, 0.06, 0.08, 0.09, 0.1, 0.5, 1.0, 1.5, 2, 2.5, 3, 4, 5, 6, 7, 8, 9, or 10 EU/mg of active compound. Typically, 1 ng lipopolysaccharide (LPS) corresponds to about 1-10 EU.

[0097] The term “half maximal effective concentration” or “EC₅₀” refers to the concentration of an agent (e.g., homodimer, heterodimer) as described herein at which it induces a response halfway between the baseline and maximum after some specified exposure time; the EC₅₀ of a graded dose response curve therefore represents the concentration of a compound at which 50% of its maximal effect is observed. EC₅₀ also represents the plasma concentration required for obtaining 50% of a maximum effect in vivo. Similarly, the “EC₉₀” refers to the concentration of an agent or composition at which 90% of its maximal effect is observed. The “EC₉₀” can be calculated from the “EC50” and the Hill slope, or it can be determined from the data directly, using routine knowledge in the art. In some embodiments, the EC₅₀ of an agent is less than about 0.01, 0.05, 0.1, 0.2, 0.3, 0.4, 0.5, 0.6, 0.7, 0.8, 0.9, 1, 2, 3, 4, 5, 6, 7, 8, 9, 10, 11, 12, 13, 14, 15, 16, 17, 18, 19, 20, 25, 30, 40, 50, 60, 70, 80, 90, 100, 200 or 500 nM. In some embodiments, an agent will have an EC₅₀ value of about 1 nM or less.

[0098] “Immune response” means any immunological response originating from immune system, including responses from the cellular and humeral, innate and adaptive immune systems. Exemplary cellular immune cells include for example, lymphocytes, macrophages, T cells, B cells, NK cells, neutrophils, eosinophils, dendritic cells, mast cells, monocytes, and all subsets thereof. Cellular responses include for example, effector function, cytokine release, phagocytosis, efferocytosis, translocation, trafficking, proliferation, differentiation, activation, repression, cell-cell interactions, apoptosis, etc. Humeral responses include for example IgG, IgM, IgA, IgE, responses and their corresponding effector functions.

[0099] The “half-life” of an agent can refer to the time it takes for the agent to lose half of its pharmacologic, physiologic, or other activity, relative to such activity at the time of administration into the serum or tissue of an organism, or relative to any other defined time-point. “Half-life” can also refer to the time it takes for the amount or concentration of an agent to be reduced by half of a starting amount administered into the serum or tissue of an organism, relative to such amount or concentration at the time of administration into the serum or tissue of an organism, or relative to any other defined time-point. The half-life can be measured in serum and/or any one or more selected tissues.

[0100] The terms “modulating” and “altering” include “increasing,” “enhancing” or “stimulating,” as well as “decreasing” or “reducing,” typically in a statistically significant or a physiologically significant amount or degree relative to a control. An “increased,” “stimulated” or “enhanced” amount is typically a “statistically significant” amount, and may include an increase that is 1.1, 1.2, 1.5, 2, 3, 4, 5, 6, 7, 8, 9, 10, 15, 20, 30, 40, 50, 60, 70, 80, 90, 100 or more times (e.g., 500, 1000 times) (including all integers and ranges in between e.g., 1.5, 1.6, 1.7, 1.8, etc.) the amount produced by no composition (e.g., the absence of agent) or a control composition. A “decreased” or “reduced” amount is typically a “statistically significant” amount, and may include a 1%, 2%, 3%, 4%, 5%, 6%, 7%, 8%, 9%, 10%, 11%, 12%, 13%, 14%, 15%, 16%, 17%, 18%, 19%, 20%, 25%, 30%, 35%, 40%, 45%, 50%, 55%, 60%, 65%, 70%, 75%, 80%, 85%, 90%, 95%, or 100% decrease (including all integers and ranges in between) in the amount produced by no composition (e.g., the absence of an agent) or a control composition. Examples of comparisons and “statistically significant” amounts are described herein.

[0101] The terms “polypeptide,” “protein” and “peptide” are used interchangeably and mean a polymer of amino acids not limited to any particular length. The term “enzyme” includes polypeptide or protein catalysts. The terms include modifications such as myristoylation, sulfation, glycosylation, phosphorylation and addition or deletion of signal sequences. The terms “polypeptide” or “protein” means one or more chains of amino acids, wherein each chain comprises amino acids covalently linked by peptide bonds, and wherein said polypeptide or protein can comprise a plurality of chains non-covalently and/or covalently linked together by peptide bonds, having the sequence of native proteins, that is, proteins produced by naturally-occurring and specifically non-recombinant cells, or genetically-engineered or recombinant cells, and comprise molecules having the amino acid sequence of the native protein, or molecules having deletions from, additions to, and/or substitutions of one or more amino acids of the native sequence. In certain embodiments, the polypeptide is a “recombinant” polypeptide, produced by recombinant cell that comprises one or more recombinant DNA molecules, which are typically made of heterologous polynucleotide sequences or combinations of polynucleotide sequences that would not otherwise be found in the cell.

[0102] The term “polynucleotide” and “nucleic acid” includes mRNA, RNA, cRNA, cDNA, and DNA. The term typically refers to polymeric form of nucleotides of at least 10 bases in length, either ribonucleotides or deoxynucleotides or a modified form of either type of nucleotide. The term includes single and double stranded forms of DNA. The terms “isolated DNA” and “isolated polynucleotide” and “isolated nucleic acid” refer to a molecule that has been isolated free of total genomic DNA of a particular species. Therefore, an isolated DNA segment encoding a polypeptide refers to a DNA segment that contains one or more coding sequences yet is substantially isolated away from, or purified free from, total genomic DNA of the species from which the DNA segment is obtained. Also included are non-coding polynucleotides (e.g., primers, probes, oligonucleotides), which do not encode a polypeptide. Also included are recombinant vectors, including, for example, expression vectors, viral vectors, plasmids, cosmids, phagemids, phage, viruses, and the like.

[0103] Additional coding or non-coding sequences may, but need not, be present within a polynucleotide described herein, and a polynucleotide may, but need not, be linked to other molecules and/or support materials. Hence, a polynucleotide or expressible polynucleotides, regardless of the length of the coding sequence itself, may be combined with other sequences, for example, expression control sequences.

[0104] The term “isolated” polypeptide or protein (the terms “polypeptide” and “protein” are used interchangeably) referred to herein means that a subject protein (1) is free of at least some other proteins with which it would typically be found in nature, (2) is essentially free of other proteins from the same source, e.g., from the same species, (3) is expressed by a cell from a different species, (4) has been separated from at least about 50 percent of polynucleotides, lipids, carbohydrates, or other materials with which it is associated in nature, (5) is not associated (by covalent or non-covalent interaction) with portions of a protein with which the “isolated protein” is associated in nature, (6) is operably associated (by covalent or non-covalent interaction) with a polypeptide with which it is not associated in nature, or (7) does not occur in nature. Such an isolated protein can be encoded by genomic DNA, cDNA, mRNA or other RNA, of may be of synthetic origin, or any combination thereof. In certain embodiments, the isolated protein is substantially free from proteins or polypeptides or other contaminants that are found in its natural environment that would interfere with its use (therapeutic, diagnostic, prophylactic, research or otherwise).

[0105] In certain embodiments, the “purity” of any given agent in a composition may be defined. For instance, certain compositions may comprise an agent such as a polypeptide agent that is at least 80%, 85%, 90%, 91%, 92%, 93%, 94%, 95%, 96%, 97%, 98%, 99%, or 100% pure on a protein basis or a weight-weight basis, including all decimals and ranges in between, as measured, for example and by no means limiting, by high performance liquid chromatography (HPLC), a well-known form of column chromatography used frequently in biochemistry and analytical chemistry to separate, identify, and quantify compounds.

[0106] The term “reference sequence” refers generally to a nucleic acid coding sequence, or amino acid sequence, to which another sequence is being compared. All polypeptide and polynucleotide sequences described herein are included as references sequences, including those described by name and those described in the Tables and the Sequence Listing.

[0107] Certain embodiments include biologically active “variants” and “fragments” of the proteins/polypeptides described herein, and the polynucleotides that encode the same. “Variants” contain one or more substitutions, additions, deletions, and/or insertions relative to a reference polypeptide or polynucleotide (see, e.g., the Tables and the Sequence Listing). A variant polypeptide or polynucleotide comprises an amino acid or nucleotide sequence with at least about 50%, 55%, 60%, 65%, 70%, 75%, 80%, 85%, 90%, 91%, 92%, 93%, 94%, 95%, 96%, 97%, 98%, 99% or more sequence identity or similarity or homology to a reference sequence, as described herein, and substantially retains the activity of that reference sequence. Also included are sequences that consist of or differ from a reference sequences by the addition, deletion, insertion, or substitution of 1, 2, 3, 4, 5, 6, 7, 8, 9, 10, 11, 12, 13, 14, 15, 16, 17, 18, 19, 20, 30, 40, 50, 60, 70, 80, 90, 100, 110, 120, 130, 140, 150 or more amino acids or nucleotides and which substantially retain at least one activity of that reference sequence. In certain embodiments, the additions or deletions include C-terminal and/or N-terminal additions and/or deletions.

[0108] The terms “sequence identity” or, for example, comprising a “sequence 50% identical to,” as used herein, refer to the extent that sequences are identical on a nucleotide-by-nucleotide basis or an amino acid-by-amino acid basis over a window of comparison. Thus, a “percentage of sequence identity” may be calculated by comparing two optimally aligned sequences over the window of comparison, determining the number of positions at which the identical nucleic acid base (e.g., A, T, C, G, I) or the identical amino acid residue (e.g., Ala, Pro, Ser, Thr, Gly, Val, Leu, Ile, Phe, Tyr, Trp, Lys, Arg, His, Asp, Glu, Asn, Gln, Cys, and Met) occurs in both sequences to yield the number of matched positions, dividing the number of matched positions by the total number of positions in the window of comparison (i.e., the window size), and multiplying the result by 100 to yield the percentage of sequence identity. Optimal alignment of sequences for aligning a comparison window may be conducted by computerized implementations of algorithms (GAP, BESTFIT, FASTA, and TFASTA in the Wisconsin Genetics Software Package Release 7.0, Genetics Computer Group, 575 Science Drive Madison, Wis., USA) or by inspection and the best alignment (i.e., resulting in the highest percentage homology over the comparison window) generated by any of the various methods selected. Reference also may be made to the BLAST family of programs as for example disclosed by Altschul et al., Nucl. Acids Res. 25:3389, 1997.

[0109] The term “solubility” refers to the property of an agent provided herein to dissolve in a liquid solvent and form a homogeneous solution. Solubility is typically expressed as a concentration, either by mass of solute per unit volume of solvent (g of solute per kg of solvent, g per dL (100 mL), mg/ml, etc.), molarity, molality, mole fraction or other similar descriptions of concentration. The maximum equilibrium amount of solute that can dissolve per amount of solvent is the solubility of that solute in that solvent under the specified conditions, including temperature, pressure, pH, and the nature of the solvent. In certain embodiments, solubility is measured at physiological pH, or other pH, for example, at pH 5.0, pH 6.0, pH 7.0, pH 7.4, pH 7.6, pH 7.8, or pH 8.0 (e.g., about pH 5-8). In certain embodiments, solubility is measured in water or a physiological buffer such as PBS or NaCl (with or without NaPO₄). In specific embodiments, solubility is measured at relatively lower pH (e.g., pH 6.0) and relatively higher salt (e.g., 500 mM NaCl and 10 mM NaPO₄). In certain embodiments, solubility is measured in a biological fluid (solvent) such as blood or serum. In certain embodiments, the temperature can be about room temperature (e.g., about 20, 21, 22, 23, 24, 25° C.) or about body temperature (37° C.). In certain embodiments, an agent has a solubility of at least about 0.1, 0.2, 0.3, 0.4, 0.5, 0.6, 0.7, 0.8, 0.9, 1, 2, 3, 4, 5, 6, 7, 8, 9, 10, 11, 12, 13, 14, 15, 16, 17, 18, 19, 20, 25, 30, 40, 50, 60, 70, 80, 90 or 100 mg/ml at room temperature or at 37° C.

[0110] A “subject” or a “subject in need thereof” or a “patient” or a “patient in need thereof” includes a mammalian subject such as a human subject.

[0111] “Substantially” or “essentially” means nearly totally or completely, for instance, 95%, 96%, 97%, 98%, 99% or greater of some given quantity.

[0112] By “statistically significant,” it is meant that the result was unlikely to have occurred by chance. Statistical significance can be determined by any method known in the art. Commonly used measures of significance include the p-value, which is the frequency or probability with which the observed event would occur, if the null hypothesis were true. If the obtained p-value is smaller than the significance level, then the null hypothesis is rejected. In simple cases, the significance level is defined at a p-value of 0.05 or less.

[0113] “Therapeutic response” refers to improvement of symptoms (whether or not sustained) based on administration of one or more therapeutic agents.

[0114] As used herein, the terms “therapeutically effective amount”, “therapeutic dose,” “prophylactically effective amount,” or “diagnostically effective amount” is the amount of an agent needed to elicit the desired biological response following administration.

[0115] As used herein, “treatment” of a subject (e.g., a mammal, such as a human) or a cell is any type of intervention used in an attempt to alter the natural course of the individual or cell. Treatment includes, but is not limited to, administration of a pharmaceutical composition, and may be performed either prophylactically or subsequent to the initiation of a pathologic event or contact with an etiologic agent. Also included are “prophylactic” treatments, which can be directed to reducing the rate of progression of the disease or condition being treated, delaying the onset of that disease or condition, or reducing the severity of its onset. “Treatment” or “prophylaxis” does not necessarily indicate complete eradication, cure, or prevention of the disease or condition, or associated symptoms thereof.

[0116] The term “wild-type” refers to a gene or gene product (e.g., a polypeptide) that is most frequently observed in a population and is thus arbitrarily designed the “normal” or “wild-type” form of the gene.

[0117] Each embodiment in this specification is to be applied to every other embodiment unless expressly stated otherwise.

### Attenuated and Activatable Protein Homodimers and Heterodimers

[0118] Embodiments of the present disclosure include attenuated protein homodimers and heterodimers, comprising IL-12A and IL-12B proteins that remain relatively inactive in the attenuated protein form, and which can be “activated” upon contact with the appropriate environment.

[0119] The attenuated protein homodimers described herein comprise at least two separate but otherwise identical polypeptide chains, which bind together via non-covalent interactions and/or certain covalent bonds, for example, disulfide bonds, but not via peptide or amide bonds. Generally, each polypeptide chain comprises a region of an immunoglobulin antigen binding domain (ABD) (for example, a light chain variable region, a heavy chain variable region), an IL-12A (p35) protein, an IL-12B (p40) protein, and at least one linker, for example, a flexible linker. The corresponding region(s) of the ABD are typically present as separate polypeptide chains, bound to the homodimer portion of the ABD via typical immunoglobulin interactions, including a disulfide bond (see, for example, FIG. 5A). The linker can be stable or degradable, for example, protease degradable. In some instances, the flexible linker is short enough to prevent or reduce intra-chain binding between the IL-12A and IL12B proteins, so that the IL-12A protein of the first polypeptide is bound to the IL-12B protein of the second polypeptide, and the IL-12A protein of the second polypeptide is bound to the IL-12B protein of the first polypeptide, to form a relatively stable homodimer in which these binding interactions sterically hinder or otherwise attenuate the IL-12 proteins in each chain from interacting with or binding to their cognate receptor(s) on an immune cell.

[0120] The attenuated protein heterodimers described herein comprise at least two separate and distinct or different polypeptide chains, which bind together via non-covalent interactions and/or certain covalent bonds, for example, disulfide bonds, but not via peptide or amide bonds (see FIGS. 5B-5C). One polypeptide chain comprises a first region of an immunoglobulin ABD (e.g., heavy chain variable region) and an IL-12A (p35) protein, and the other polypeptide chain comprises a second region of the ABD (e.g., light chain variable region) and an IL-12B (p40) protein, and optional linkers in between. The p35 and p40 proteins are bound together, and first and second regions of the ABD are bound together via a disulfide bond to form a functional ABD. At least one of the p35 protein and/or the P40 protein is a variant that has reduced binding affinity to the IL-12 co-receptors on the surface of an immune cell. Certain attenuated protein heterodimers comprise four polypeptide chains (two of the p35 polypeptide chains, and two of the p40 polypeptide chains), which bind together to form tetramers (see FIGS. 5D-5E). In certain of these and related embodiments, the linkers are relatively short, for example, about or less than about 1, 2, 3, 4, 5, 6, 7, 8, 9, or 10 amino acids in length.

[0121] As noted above, the homodimers and heterodimers described herein comprise at least one immunoglobulin ABD. Typically, the ABD has binding specificity (that is, it specifically binds) to a cell surface receptor on a cell, for example, cell surface receptor that is not an IL-12 receptor but is co-expressed on an immune cell with the IL-12 co-receptor complex. In some instances, the cell surface receptor is inducible or conditionally-expressed under appropriate conditions, for example, diseased conditions such as a tumor microenvironment. If an immune cell expresses only the IL-12 co-receptors (and not the targeted cell surface receptor), the attenuated protein homodimers and heterodimers at best bind weakly to the cell and initiate little to no signaling activity. However, if an immune cell expresses the IL-12 co-receptors along with the targeted cell surface receptor, then binding of the ABD to the cell surface receptor limits the diffusivity property of the attenuated protein homodimer or heterodimer, increases its binding (avidity) to the IL-12 co-receptors on the immune cell, and thereby increases at least one IL-12 signaling activity of the homodimer or heterodimer. In some instances, the ABD has binding specificity (that is, it specifically binds) to a plasma protein or an extracellular matrix (ECM) protein. Here, binding of the ABD to such target proteins likewise limits the diffusivity property of the homodimer or heterodimer, which increases the binding avidity of the IL-12 variant(s) to IL-12 co-receptors on a nearby immune cell, and thereby increases the IL-12 variant signaling activity of the homodimer or heterodimer. Thus, the attenuated protein homodimers and heterodimers described herein can be selectively activated against a sub-population of immune cells that co-express IL-12 co-receptors and the targeted cell surface protein, plasma protein, or ECM protein, for example, locally-activated immune cells in diseases or otherwise damaged tissues, including tumor tissues.

[0122] The attenuated protein homodimers and heterodimers described herein address many of the drawbacks of standard IL-12 therapies in the treatment of cancer, infectious diseases, and other diseases, including high initial serum Cₘₐₓ, which causes over-activation of the immune system, short PK because of the otherwise small molecular size of IL-12 and/or catabolism by the large number of immune cells that express IL-12 receptors, poor accumulation in the target tissues (e.g., cancers, tumors) because of the short PK and/or ineffective tumor targeting, and undesirable accumulation and immune activation in normal tissues.

[0123] Embodiments of the present disclosure thus include an attenuated protein homodimer, comprising a first polypeptide and a second polypeptide, wherein:
[0124] the first and the second polypeptide comprise, in an N- to C-terminal orientation, a region of an immunoglobulin antigen binding domain (ABD), an IL-12A (p35) protein, a linker, and an IL-12B (p40) protein (see, for example, FIG. 5A),
[0125] wherein the ABD specifically binds to a cell surface protein expressed on a cell, a plasma protein, or an extracellular matrix (ECM) protein, wherein the IL-12A protein of the first polypeptide is bound to the IL-12B protein of the second polypeptide, and wherein the IL-12B protein of the first polypeptide is bound to the IL-12A protein of the second polypeptide, wherein said binding partially masks a binding site of IL-12 protein(s) that otherwise binds to an IL-12Rβ1/IL-12Rβ2 receptor complex on the surface of an immune cell in vitro or in vivo and attenuates or reduces at least one IL-12 signaling activity of the homodimer relative to wild-type IL-12.

[0126] Also included is an attenuated protein heterodimer, comprising a first polypeptide and a second polypeptide, wherein:
[0127] (a) the first polypeptide comprises, in an N- to C-terminal orientation, a variable heavy chain (VH) region and a CH1 region, an optional linker, and an IL-12A (p35) protein, and the second polypeptide comprises, in an N- to C-terminal orientation, a variable light chain (VL) region and a CL region, an optional linker, and an IL-12B (p40) protein, wherein the p35 protein of the first polypeptide is bound to the p40 protein of the second polypeptide (see, for example, FIG. 5B); or
[0128] (b) the first polypeptide comprises, in an N- to C-terminal orientation, a variable heavy chain (VH) region and a CH1 region, an optional linker, and an IL-12B (p40) protein, and the second polypeptide comprises, in an N- to C-terminal orientation, a variable light chain (VL) region and a CL region, an optional linker, and an IL-12A (35) protein, wherein the p40 protein of the first polypeptide is bound to the p35 protein of the second polypeptide (see, for example, FIG. 5C),
[0129] wherein the CH1 region and the CL region of (a) or (b) are bound together via a disulfide bond to form an immunoglobulin antigen binding domain (ABD), wherein the ABD specifically binds to a cell surface protein expressed on a cell, a plasma protein, or an extracellular matrix (ECM) protein, and wherein at least one of the p35 and/or the p40 protein is a variant that has one or more amino acid alterations relative to a wild-type p35 or p40 sequence, and which has reduced binding affinity to a wild-type IL-12Rβ1/IL-12Rβ2 receptor complex on the surface of an immune cell in vitro or in vivo relative to that of the wild-type p35 and/or p40 sequence.

[0130] Certain of the attenuated protein heterodimers comprise four polypeptides selected from:
[0131] (i) two of the first and second polypeptides of (a); and
[0132] (ii) two of the first and second polypeptides of (b), wherein the four polypeptides are bound together to form an attenuated protein tetramer, that is, an oligomer composed of four monomers or subunits. In specific attenuated protein tetramers, the linkers are about or less than about 1, 2, 3, 4, 5, 6, 7, 8, 9, or 10 amino acids in length.

[0133] Exemplary IL-12A (p35) proteins, IL-12B (p40) proteins, ABDs to cell surface proteins, plasma proteins, and ECM proteins, and linkers are described elsewhere herein.

[0134] As noted above, the attenuated homodimer and heterodimer proteins have (inherently) reduced binding affinity to the wild-type IL-12Rβ1/IL-12Rβ2 receptor complex on the surface of an immune cell. In certain attenuated homodimer proteins, the homodimeric binding between the first and second polypeptides allosterically interferes with or inhibits the binding of the IL-12A and/or IL12B proteins to their target receptor, for example, cognate IL-12Rβ1/IL-12Rβ2 receptor complexes on the surface of an immune cell. In the attenuated heterodimer proteins, as noted above, at least one the IL-12A and/or IL12B protein is a low-affinity variant that has reduced binding affinity to the wild-type IL-12Rβ1/IL-12Rβ2 receptor complex on the surface of an immune cell. In these and related embodiments, and under conditions where the cell surface protein is not substantially co-expressed with the IL-12 co-receptors, the attenuated homodimer or heterodimer protein show no binding, or substantially no binding, or attenuated binding to its target (the IL-12Rβ1/IL-12Rβ2 receptor complex), or no more than 0.001%, 0.01%, 0.1%, 1%, 2%, 3%, 4%, 5%, 6%, 7%, 8%, 9%, 10%, 15%, 20%, 25%, 30%, 35%, 40%, or 50% binding to its target, as compared to the binding of the wild-type IL-12 proteins alone, optionally for at least 2, 4, 6, 8, 12, 28, 24, 30, 36, 48, 60, 72, 84, 96 hours, or 5, 10, 15, 30, 45, 60, 90, 120, 150, 180 days, or 1, 2, 3, 4, 5, 6, 7, 8, 9, 10, 11, 12 months or greater, optionally as measured in vivo or in a Target Displacement in vitro assay available in the art.

[0135] In some embodiments, as noted above, binding of the ABD to the cell surface protein, plasma protein, or ECM protein, increases binding (avidity) of the IL-12 protein(s) in the homodimer or heterodimer to the IL-12Rβ1/IL-12Rβ2 receptor complex on the surface of an immune cell in vitro or in vivo, and thereby increases at least one IL-12 signaling activity of the homodimer. In specific embodiments, binding of the ABD to the cell surface protein increases binding (avidity) of the IL-12 protein(s) in the homodimer or heterodimer to the IL-12Rβ1/IL-12Rβ2 receptor complex by about or at least about 10%, 20%, 30%, 40%, 50%, 60%, 70%, 80%, 90%, 100%, 200%, 300%, 400%, 500%, 1000%, 2000%, 3000%, 4000%, or 5000% or more. In particular embodiments, binding of the ABD to the cell surface protein increases at least one IL-12 signaling activity of the homodimer or heterodimer by about or at least about 10%, 20%, 30%, 40%, 50%, 60%, 70%, 80%, 90%, 100%, 200%, 300%, 400%, 500%, 1000%, 2000%, 3000%, 4000%, or 5000% or more. In some embodiments, the at least one IL-12 signaling activity is selected from one or more of stimulating growth and function of T cells, enhancing cytotoxic activity of NK cells and/or CD8+ T cells, stimulating production of interferon-γ (IFN-γ) and/or tumor necrosis factor-α (TNF-α), and inhibiting angiogenesis.

[0136] In some instances, the various components of each polypeptide chain can be fused in any orientation or combination. For example, in some attenuated protein homodimers, the ABD comprises a (i) variable heavy chain (VH) region and a CH1 region, and (ii) a variable light chain (VL) region and a CL region, including wherein the CH1 region and the CL region are bound together via a disulfide bond. In certain of these and related embodiments, the C-terminus of the CH1 region is fused to the N-terminus of the p35 protein, optionally via a linker, and the VL/CL region is a separate polypeptide chain that is bound to the VH/CH1 region via the disulfide bond. In some embodiments, the C-terminus of the CL region is fused to the N-terminus of the p35 protein, optionally via a linker, and the VH/CH1 region is a separate polypeptide chain that is bound to the VL/CL region via the disulfide bond.

[0137] Certain attenuated protein homodimers and heterodimers are composed only of two of the foregoing protein chains, that is, they are composed only of a first polypeptide and a second polypeptide, as described herein. In some instances, however, certain homodimers and heterodimers comprise multiple chains, for example, where the first and second polypeptide chains form a “core structure” upon which additional or higher-order structures can be built, the various core structures being optionally bound together via additional protein binding domains, for example, tumor-targeting domains, serum albumin, human serum albumin binding domains, cell-surface targeted binding domains, matrix protein binding domains, and others.

[0138] The individual components of the attenuated protein homodimers and heterodimers are described in greater detail herein.

[0139] Interleukin-12 (IL-12) Proteins. The attenuated protein homodimers and heterodimers described herein comprise at least one “IL-12 protein”. IL-12 is a cytokine produced by dendritic cells, macrophages, neutrophils, and human B-lymphoblastoid cells (NC-37) in response to antigenic stimulation. IL-12 binds to the IL-12 receptor, which is a heterodimeric receptor formed by IL-12Rβ1 and IL-12Rβ2.

[0140] IL-12 is a heterodimeric cytokine encoded by two separate genes, IL-12A (p35) and IL-12B (p40). The active heterodimer (referred to as “p70”) is formed following protein synthesis.

[0141] Exemplary IL-12A (p35) polypeptide sequences are provided in Table S1.

TABLE S1
Exemplary IL-12A (p35) Polypeptides

| | | SEQ ID |
|---|---|---|
| Name | Sequence | NO. |
| Human IL- | MCPARSLLLVATLVLLDHLSLARNLPVATPDPGMFPCLHHSQNLLRAVSN | 1 |
| 12A (P35) | MLQKARQTLEFYPCTSEEIDHEDITKDKTSTVEACLPLELTKNESCLNSR | |
| Full-length | ETSFITNGSCLASRKTSFMMALCLSSIYEDLKMYQVEFKTMNAKLLMDPK | |
| | RQIFLDQNMLAVIDELMQALNFNSETVPQKSSLEEPDFYKTKIKLCILLH | |
| | AFRIRAVTIDRVMSYLNAS | |
| Human IL- | RNLPVATPDPGMFPCLHHSQNLLRAVSNMLQKARQTLEFYPCTSEEIDHE | 2 |
| 12A (P35) | DITKDKTSTVEACLPLELTKNESCLNSRETSFITNGSCLASRKTSFMMAL | |
| Mature | CLSSIYEDLKMYQVEFKTMNAKLLMDPKRQIFLDQNMLAVIDELMQALNE | |
| | NSETVPQKSSLEEPDFYKTKIKLCILLHAFRIRAVTIDRVMSYLNAS | |
| Human IL- | RNLPVATPDPGMFPCLHHSQNLLRAVSNMLQKARQTLEFYPCTSEEIDHE | 3 |
| 12A (P35) | DITKDKTSTVEACLPLELTKNESSLNSRETSFITNGSCLASRKTSFMMAL | |
| Mature | CLSSIYEDLKMYQVEFKTMNAKLLMDPKRQIFLDQNMLAVIDELMQALNF | |
| variant | NSETVPQKSSLEEPDFYKTKIKLCILLHAFRIRAVTIDRVMSYLNAS | |
| Human IL- | RNLPVATPDPGMFPCLHHSQNLLRAVSNMLQKARQTLEFYPCTSEEIDHE | 4 |
| 12A (P35) | DITKDKTSTVEACLPLELTKNESALNSRETSFITNGSCLASRKTSFMMAL | |
| Mature | CLSSIYEDLKMYQVEFKTMNAKLLMDPKRQIFLDQNMLAVIDELMQALNF | |
| variant | NSETVPQKSSLEEPDFYKTKIKLCILLHAFRIRAVTIDRVMSYLNAS | |
| Human IL- | RNLPVATPDPGMFPCLHHSQNLLRAVSNMLqKARQTLEFYPCTSEEIDHE | 5 |
| 12A (P35) | DITKDKTSTVEACLPLELTKNESSLNSRETSFITNGSCLASRKTSFMMAL | |
| Mature | CLSSIYEDLKMYQVEFKTMNAKLLMDPKRQIFLDQNMLAVIDELMQALNF | |
| variant | NSETVPQKSSLEEPDFYKTKIKLCILLHAFRIRAVTIDRVMSYLNAA | |
| Human IL- | RNLPVATPDPGMFPCLHHSQNLLRAVSNMLQKARQTLEFYPCTSEEIDHE | 6 |
| 12A (P35) | DITKDKTSTVEACLPLELTKNESSLNSRETSFITNGSCLASRKTSFMMAL | |
| Mature | CLSSIYEDLKMYQVEFKTMNAKLLMDPKRQIFLDQNMLAVIDELMQALNF | |
| variant | NSETVPQKSSLEEPDFYKTKIKLCILLHAFRIRAVTIARVMSYLNAA | |
| Human IL- | RNLPVATPDPGMFPCLHHSQNLLRAVSNMLQKARQTLEFYPCTSEEIDHE | 7 |
| 12A (P35) | DITKDKTSTVEACLPLELTKNESSLNSRETSFITNGSCLASRKTSFMMAL | |
| Mature | CLSSIYEDLKMYQVEFKTMNAKLLMDPKRQIFLDQNMLAVIDELMQALNF | |
| variant | NSETVPQKSSLEEPDFAKTKIKLCILLHAFRIRAVTIDRVMSYLNAA | |
| Human IL- | RNLPVATPDPGMFPCLHHSQNLLRAVSNMLQKARQTLEFYPCTSEEIDHE | 8 |
| 12A (P35) | DITKDKTSTVEACLPLELTKNESSLNSRETSFITNGSCLASRKTSFMMAL | |
| Mature | CLSSIYEDLKMYQVEFKTMNAKLLMDPKRQIFLDQNMLAVIDELMQALNF | |
| variant | NSETVPQKSSLEEPDFDKTKIKLCILLHAFRIRAVTIDRVMSYLNAA | |

[0142] Thus, in certain embodiments, an IL-12A protein comprises, consists, or consists essentially of one or more amino acid sequences selected from Table S1, or an active variant or fragment thereof that is at least 80, 85, 90, 95, 98, or 100% identical to a sequence selected from Table S1. In particular embodiments, the IL-12A protein is a mature form of IL-12A, or an active variant or fragment thereof. In certain embodiments, an IL-12A protein is a variant that comprises or retains an amino acid substitution at C74, as defined by the mature IL-12A sequence, including C74A or C74S.

[0143] In certain embodiments, an IL-12A protein is a variant that comprises or retains an amino acid substitution at S197, as defined by the mature IL-12A sequence, including S197A. In some embodiments, an IL-12A protein comprises an additional alanine residue (A) at position 198. In certain embodiments, the IL-12A (p35) protein is a variant (e.g., a low binding-affinity variant) that has one or more amino acid alterations relative to a wild-type p35 sequence, and which has reduced binding affinity to a wild-type IL-12Rβ1/IL-12Rβ2 receptor complex on the surface of an immune cell in vitro or in vivo relative to that of the wild-type p35 sequence. In some embodiments, the p35 protein is a variant that has reduced binding affinity to wild-type IL-12Rβ1/IL-12Rβ2 receptor complex of about or at least about 2-fold, 5-fold, 10-fold, 50-fold, 100-fold, 1000-fold or more, relative to the binding affinity of the wild-type p35 sequence. In some instances, the low binding-affinity variant has an amino acid substitution at any one or more of Y167, E38, F39, P41, K128, F166, and/or D188, as defined by the mature p35 sequence. In specific embodiments, the amino acid substitution is selected from any one or more of Y167A, Y167D, Y167E, Y167F, Y167G, Y167H, Y167I, Y167L, Y167N, Y167Q, Y167S, Y167T, and Y167V; E38A, E38D, E38F, E38G, E38H, E38I, E38K, E38L, E38M, E38N, E38P, E38Q, E38R, E38S, E38T, E38V, and E38W; F39A, F39D, F39E, F39G, F39H, F39I, F39K, F39L, F39M, F39N, F39P, F39Q, F39R, F39S, F39T, F39V, F39W, and F39Y; P41A, P41D, P41E, P41F, P41G, P41H, P41I, P41K, P41L, P41M, P41N, P41Q, P41R, P41S, P41T, P41V, P41W, and P41Y; K128A, K128D), K128E, K128F7, K128G, K128H, K128I, K128L, K128M, K128N, K128P, K128Q, K128R, K128S, K128T, K128V, K128W, and K128Y; F166A, F166D, F166E, F166G, F166H, F166I, F166K, F166L, F166M, F166N, F166P, F166Q, F166R, F166S, F166T, F166V, F166W, and F166Y; and D188A, including any combination of the foregoing. In some embodiments, the low-binding affinity p35 protein comprises, consists, or consists essentially of one or more amino acid sequences selected from Table S1, or an active variant or fragment thereof that is at least 80, 85, 90, 95, 98, or 100% identical to a sequence selected from Table 81, and which comprises or retains any one or more of the foregoing amino acid substitutions.

[0144] Exemplary IL-12B (p40) polypeptide sequences are provided in Table 82.

TABLE S2
Exemplary IL-12B Polypeptides

| | | SEQ ID |
|---|---|---|
| Name | Sequence | NO. |
| Human IL- | MCHQQLVISWFSLVFLASPLVAIWELKKDVYVVELDWYPDAPGEMVVLTC | 9 |
| 12B (P40) | DTPEEDGITWTLDQSSEVLGSGKTLTIQVKEFGDAGQYTCHKGGEVLSHS | |
| Full-length | LLLLHKKEDGIWSTDILKDQKEPKNKTFLRCEAKNYSGRFTCWWLTTIST | |
| | DLTFSVKSSRGSSDPQGVTCGAATLSAERVRGDNKEYEYSVECQEDSACP | |
| | AAEESLPIEVMVDAVHKLKYENYTSSFFIRDIIKPDPPKNLQLKPLKNSR | |
| | QVEVSWEYPDTWSTPHSYFSLTFCVQVQGKSKREKKDRVFTDKTSATVIC | |
| | RKNASISVRAQDRYYSSSWSEWASVPCS | |
| Human IL- | IWELKKDVYVVELDWYPDAPGEMVVLTCDTPEEDGITWTLDQSSEVLGSG | 10 |
| 12B | KTLTIQVKEFGDAGQYTCHKGGEVLSHSLLLLHKKEDGIWSTDILKDQKE | |
| (P40) | PKNKTFLRCEAKNYSGRFTCWWLTTISTDLTFSVKSSRGSSDPQGVTCGA | |
| Mature | ATLSAERVRGDNKEYEYSVECQEDSACPAAEESLPIEVMVDAVHKLKYEN | |
| | YTSSFFIRDIIKPDPPKNLQLKPLKNSRQVEVSWEYPDTWSTPHSYESLT | |
| | FCVQVQGKSKREKKDRVFTDKTSATVICRKNASISVRAQDRYYSSSWSEW | |
| | ASVPCS | |
| Human IL- | IWELKKDVYVVELDWYPDAPGEMVVLTCDTPEEDGITWTLDQSSEVLGSG | 11 |
| 12B | KTLTIQVKEFGDAGQYTCHKGGEVLSHSLLLLHKKEDGIWSTDILKDQKE | |
| (P40) | PKNKTFLRCEAKNYSGRFTCWWLTTISTDLTFSVKSSRGSSDPQGVTCGA | |
| Mature | ATLSAERVRGDNKEYEYSVECQEDSACPAAEESLPIEVMVDAVHKLKYEN | |
| variant | YTSSFFIRDIIKPDPPKNLQLKPLKNSRQVEVSWEYPDTWSTPHSYFSLT | |
| | FCVQVQGQDQDEKKDRVFTDKTSATVICRKNASISVRAQDRYYSSSWSEW | |
| | ASVPCS | |
| Human IL- | IWELKKDVYVVELDWYPDAPGEMVVLTCDTPEEDGITWTLDQSSEVLGSG | 12 |
| 12B | KTLTIQVKEFGDAGQYTCHKGGEVLSHSLLLLHKKEDGIWSTDILKDQKE | |
| (P40) | PKNKTFLRCEAKNYSGRFTCWWLTTISTDLTFSVKSSRGSSDPQGVTCGA | |
| Mature | ATLSAERVRGDNKEYEYSVECQEDSAAPAAEESLPIEVMVDAVHKLKYEN | |
| variant | YTSSFFIRDIIKPDPPKNLQLKPLKNSRQVEVSWEYPDTWSTPHSYFSLT | |
| | FCVQVQGQDQDEKKDRVFTDKTSATVICRKNASISVRAQDRYYSSSWSEW | |
| | ASVPCS | |
| Human IL- | IWELKKDVYVVELDWYPDAPGEMVVLTCDTPEEDGITWTLDQSSEVLGSG | 13 |
| 12B | KTLTIQVKEFGDAGQYTCHKGGEVLSHSLLLLHKKEDGIWSTDILKDQKE | |
| (P40) | PKNKTFLRCEAKNYSGRFTCWWLTTISTDLTFSVKSSRGSSDPQGVTCGA | |
| Mature | ATLSAERVRGDNKEYEYSVECQEDSAAPAAEESLPIEVMVDAVHKLKYEN | |
| variant | YTSSFFIRDIIKPDPPKNLQLKPLKNSRQVEVSWEYPDTWSTPHSYESLT | |
| | FCVQVQGQDQDEKKDRVFTDKTSATVICRKNASISVRAQARYYSSSWSEW | |
| | ASVPCS | |
| Human IL- | IWELKKDVYVVELDWYPDAPGEMVVLTCDTPEEDGITWTLDQSSEVLGSG | 14 |
| 12B | KTLTIQVKEFGDAGQYTCHKGGEVLSHSLLLLHKKEDGIWSTDILKDQKE | |
| (P40) | PKNKTFLRCEAKNFSGRFTCWWLTTISTDLTFSVKSSRGSSDPQGVTCGA | |
| Mature | ATLSAERVRGDNKEYEYSVECQEDSAAPAAEESLPIEVMVDAVHKLKYEN | |
| variant | YTSSFFIRDIIKPDPPKNLQLKPLKNSRQVEVSWEYPDTWSTPHSYESLT | |
| | FCVQVQGQDQDEKKDRVFTDKTSATVICRKNASISVRAQDRYYSSSWSEW | |
| | ASVPC | |
| Human IL- | IWELKKDVYVVELDWYPDAPGEMVVLTCDTPEEDGITWTLDQSSEVLGSG | 15 |
| 12B | KTLTIQVKEFGDAGQYTCHKGGEVLSHSLLLLHKKEDGIWSTDILKDQKE | |
| (P40) | PKNKTFLRCEAKNYSGRFTCWWLTTISTDLTFSVKSSRGSSDPQGVTCGA | |
| Mature | ATLSAERVRGDNKEYEYSVECQEDSAAPAAEESLPIEVMVDAVHKLKYEN | |
| variant | YTSSFFIRDIIKPDPPKNLQLKPLKNSRQVEVSWEYPDTWSTPHSYESLT | |
| | FSVQVQGQDQDEKKDRVFTDKTSATVICRKNASISVRAQDRYYSSSWSEW | |
| | ASVPCS | |
| Human IL- | IWELKKDVYVVELDWYPDAPGEMVVLTCDTPEEDGITWTLDQSSEVLGSG | 16 |
| 12B | KTLTIQVKEFGDAGQYTCHKGGEVLSHSLLLLHKKEDGIWSTDILKDQKE | |
| (P40) | PKNKTFLRCEAKNYSGRFTCWWLTTISTDLTFSVKSSRGSSDPQGVTCGA | |
| Mature | ATLSAERVRGDNKEYEYSVECQEDSAAPAAEESLPIEVMVDAVHKLKYEN | |
| variant | YTSSFFIRDIIKPDPPKNLQLKPLKNSRQVEVSWEYPDTWSTPHSYFSLT | |
| | FCVQVQGKSKREKKDRVFTDKTSATVICRKNASISVRAQDRYYSSSWSEW | |
| | ASVPCS | |
| Human IL- | IWELKKDVYVVELDWYPDAPGEMVVLTCDTPEEDGITWTLDQSSEVLGSG | 17 |
| 12B | KTLTIQVKEFGDAGQYTCHKGGEVLSHSLLLLHKKEDGIWSTDILKDQKE | |
| (P40) | PKNKTFLRCEAKNYSGRFTCWWLTTISTDLTFSVKSSRGSSDPQGVTCGA | |
| Mature | ATLSAERVRGDNKEYEYSVECQEDSAAPAAEESLPIEVMVDAVHKLKYEN | |
| variant | YTSSFFIRDIIKPDPPKNLQLKPLKNSRQVEVSWEYPDTWSTPHSYFSLT | |
| | FSVQVQGKSKREKKDRVFTDKTSATVICRKNASISVRAQDRYYSSSWSEW | |
| | ASVPCS | |
| Human IL- | IWELKKDVYVVELDWYPDAPGEMVVLTCDTPEEDGITWTLDQSSEVLGSG | 18 |
| 12B | KTLTIQVKEFGDAGQYTCHKGGEVLSHSLLLLHKKEDGIWSTDILKDQKE | |
| (P40) | PKNKTFLRCEAKNYSGRFTCWWLTTISTDLTFSVKSSRGSSDPQGVTCGA | |
| Mature | ATLSAERVRGDNKEYEYSVECQEDSACPAAEESLPIEVMVDAVHKLKYEN | |
| variant | YTSSFFIRDIIKPDPPKNLQLKPLKNSRQVEVSWEYPDTWSTPHSYFSLT | |
| | FSVQVQGQDQDEKKDRVFTDKTSATVICRKNASISVRAQDRYYSSSWSEW | |
| | ASVPCS | |
| Human IL- | IWELKKDVYVVELDWYPDAPGEMVVLTCDTPEEDGITWTLDQSSEVLGSG | 19 |
| 12B | KTLTIQVKEFGDAGQYTCHKGGEVLSHSLLLLHKKEDGIWSTDILKDQKE | |
| (P40) | PKNKTFLRCEAKNYSGRFTCWWLTTISTDLTFSVKSSRGSSDPQGVTCGA | |
| Mature | ATLSAERVRGDNKEYEYSVECQEDSACPAAEESLPIEVMVDAVHKLKYEN | |
| variant | YTSSFFIRDIIKPDPPKNLQLKPLKNSRQVEVSWEYPDTWSTPHSYFSLT | |
| | FSVQVQGKSKREKKDRVFTDKTSATVICRKNASISVRAQDRYYSSSWSEW | |
| | ASVPCS | |

[0145] Thus, in certain embodiments, an IL-12B protein comprises, consists, or consists essentially of one or more amino acid sequences selected from Table S2, or an active variant or fragment thereof that is at least 80, 85, 90, 95, 98, or 100% identical to a sequence selected from Table S2. In particular embodiments, the IL-12B protein is a mature form of IL-12B3, or an active variant or fragment thereof. In some embodiments, the IL-12B protein is a variant that comprises or retains amino acid substitutions at any one or more of Y144, C177, C252, K258, S259, K260, R261, and/or D290, including combinations thereof, as defined by the mature IL-12B sequence, including any one or more of Y114F, C177A, C252S, K258Q, S259D), K260Q, R261D), and/or D290A, including combinations thereof (e.g., QDQD at residues K258-R261).

[0146] In certain embodiments, the IL-12B (p40) protein is a variant (e.g., a low binding-affinity variant) that has one or more amino acid alterations relative to a wild-type p40 sequence, and which has reduced binding affinity to a wild-type IL-12Rβ1/IL-12Rβ2 receptor complex on the surface of an immune cell in vitro or in vivo relative to that of the wild-type p40 sequence. In some embodiments, the p40 protein is a variant that has reduced binding affinity to wild-type IL-12Rβ1/IL-12Rβ2 receptor complex of about or at least about 2-fold, 5-fold, 10-fold, 50-fold, 100-fold, 1000-fold or more, relative to the binding affinity of the wild-type p40 sequence. In specific embodiments, the p40 protein has or retains an amino acid substitution at any one or more of D18, E59, K99, and/or K264, as defined by the mature p40 sequence

[0147] In some embodiments, an “active” or “activated” heterodimer, homodimer, IL-12A or IL-12B protein, or fragment or variant thereof, is characterized, for example, by its ability to bind to an IL-12RβI and/or IL-12Rβ2 receptor chain (e.g., IL-12Rβ1/IL-12Rβ2 complex) present on the surface of an immune cell in vitro or in vivo, and stimulate downstream IL-12 signaling activities. Certain exemplary IL-12 signaling activities include differentiation of naive T cells into Th1 cells, stimulating growth and function of T cells generally, activation of the cytotoxic activity of natural killer (NK) cells and cytotoxic T lymphocytes, and anti-angiogenic activities (i.e., reducing formation of new blood vessels), among other activities. Additional examples of IL-12 signaling activities include stimulating the production of interferon-gamma (IFN-γ) and tumor necrosis factor-alpha (TNF-α) from T cells and NK cells, and reducing IL-4 mediated suppression of IFN-γ.

[0148] In some instances, IL-12A and/or IL-12B binds to the IL-12Rβ2 subunit of IL-12 receptor, which is found on activated T cells and is stimulated by cytokines that promote Th1 cell development and inhibited by those that promote Th2 cell development. Upon binding, IL-12R-β2 becomes tyrosine phosphorylated and provides binding sites for kinases, Tyk2 and Jak2, which in turn activate transcription factor proteins such as STAT4. Thus, in some instances, an active or activated IL-12A and/or IL-12B polypeptide activates the JAK-STAT pathway. In some instances, an IL-12A and/or IL-12B polypeptide has an anti-cancer activity.

[0149] Any one or more of the foregoing IL-12 proteins can be combined with any of the other components described herein, for example, ABDs and linkers, and other optional protein domains, to generate one or more attenuated protein homodimers or heterodimers, or larger, multi-chain structures comprising the same.

[0150] Antigen Binding Domains (ABDs). The attenuated protein homodimers and heterodimers described herein comprise an immunoglobulin ABD, which specifically binds to a cell surface protein expressed on a cell (for example, an immune cell), a plasma protein, or an extracellular matrix (ECM) protein. In particular embodiments, the cell surface protein is inducible and co-expressed on an immune cell with the IL-12Rβ1/IL-12Rβ2 receptor complex. By “inducible” is meant that the cell surface protein is not substantially constitutively expressed on the immune cell, but is rather conditionally-expressed upon certain conditions, for example, activation of the immune cell, exposure of the immune cell to diseased tissue, including tumor tissues, among other conditions.

[0151] In certain embodiments, the cell surface protein is selected from Programmed cell death protein 1 (PD-1), Programmed death-ligand 1 (PD-L1), B7H3 (CD276), T cell immunoreceptor with Ig and ITIM domains (TIGIT), T-cell immunoglobulin and mucin-domain containing-3 (TIM-3), NKG2D, 4-1BB (CD137), CD3, CD4, CD8, CD25, and CD70. Exemplary antibodies against the foregoing cell surface proteins are known in the art.

[0152] PD-1 is a cell surface receptor that belongs to the immunoglobulin superfamily and is expressed on activated T cells, B cells, and myeloid. PD-1 interacts with two ligands, PD-L1 and PD-L2. Exemplary anti-PD-1 antibodies include nivolumab, pembrolizumab, PDR001, MK-3475, AMP-224, AMP-514, and pidilizumab, among others (see, e.g., U.S. Pat. Nos. 8,008,449; 8,993,731; 9,073,994; 9,084,776; 9,102,727; 9,102,728; 9,181,342; 9,217,034; 9,387,247; 9,492,539; 9,492,540; and U.S. Application Nos. 2012/0039906; 2015/0203579). PD-L1 is expressed on macrophages, among other cells. Exemplary anti-PD-L1 antibodies include atezolizumab (MPDL3280A), avelumab (MSB0010718C), and durvalumab (MEDI4736), among others (see, e.g., U.S. Pat. Nos. 9,102,725; 9,393,301; 9,402,899; 9,439,962).

[0153] B7H3, or CD276, is an immune checkpoint molecule expressed on a variety of cells, including tumor cells. Exemplary anti-B7H3 antibodies include enoblituzumab (MGA271), omburtamab (8H9), MGC018, Orlotamab (MGD009), among others (see, for example, Yang et al., Int J Biol Sci. 16:1767-1773, 2020).

[0154] TIGIT is a co-inhibitory receptor that is found on the surface of a variety of lymphoid cells, and suppresses antitumor immunity, for example, via Tregs. Exemplary anti-TIGIT antibodies include tiragotumab and etigilimab, among others (see, e.g., Johnston et al., Cancer Cell. 26:923-37, 2014; and Solomon and Garrido-Laguna, Cancer Immunol Immunother. 67:1659-1667, 2018). TIM-3 is an immune checkpoint molecule expressed, for example, on the cell surface of IFNγ-producing or activated CD4+Th1 cells, CD8+Tc1 cells, monocytes, macrophages, and dendritic cells. Exemplary anti-TIM-3 antibodies include TSR-022, MBG453, and LY3321367, among others (see, for example, Acharya et al., Tim-3 finds its place in the cancer immunotherapy landscape, Journal for Immuno Therapy of Cancer. 2020; 8: e000911.doi:10.1136/jitc-2020-000911).

[0155] NKG2D is a transmembrane protein belonging to the NKG2 family of C-type lectin-like receptors, and is expressed one NK cells, γδ T cells, and CD8+αβ T cells, among others (see, for example, Bauer et al., Science. 285:727-9, 1999). Exemplary anti-NKG2D antibodies include NNC0142-0002, CX5, and B10G5, among others (see, for example, Allez et al., Gut. 66:1918-1925, 2017; Steigerwald et al., MAbs. 1:115-127, 2009; and Lu et al., Clin Cancer Res. 21:4819-30, 2015). 4-1BB, or CD137, is a member of the tumor necrosis factor (TNF) receptor family, and is expressed on activated T cells of both the CD4+ and CD8+ lineages. Exemplary anti-4-1BB antibodies include utomilumab (PF-05082566) and urelumab (663513), among others (see, for example, Qiao et al., Int J Biol Sci. 3:455-462, 2007; and Girard and Watts, Immunity. 49:791-3, 2018).

[0156] CD3 is a protein complex and T cell co-receptor that is involved in activating cytotoxic T cells (CD8+ naive T cells) and T helper cells (CD4+ naive T cells). It is expressed on the surface of mature T cells. Exemplary anti-CD3 antibodies include muromonab-CD3, otelixizumab, teplizumab, foralumab, and visilizumab, among others. CD4 is a glycoprotein expressed on the surface of immune cells such as T helper cells, monocytes, macrophages, and dendritic cells. It is a co-receptor of the T cell receptor (TCR) and assists the latter in communicating with antigen-presenting cells. Exemplary anti-CD4 antibodies include cedelizumab, clenoliximab, ibalizumab, keliximab, priliximab, tregalizumab, and zanolimumab, among others.

[0157] CD8 is a transmembrane glycoprotein that serves as a co-receptor for the T-cell receptor (TCR). Along with the TCR, the CD8 co-receptor plays a role in T cell signaling and aiding with cytotoxic T cell antigen interactions. CD8 is mainly expressed on the surface of cytotoxic T cells, but can also be found on natural killer cells, cortical thymocytes, and dendritic cells. Exemplary anti-CD8 antibodies are widely commercially available. CD25 (or interleukin-2 receptor alpha chain, IL-2Rα) is a type I transmembrane protein expressed on activated T cells, activated B cells, some thymocytes, myeloid precursors, and oligodendrocytes. Exemplary anti-CD25 antibodies include basiliximab, daclizumab, and inolimomab, among others. CD70 is a protein that is expressed on highly activated lymphocytes. Exemplary anti-CD70 antibodies include ARGX-110, cusatuzumab, and vorsetuzumab, among others (see, for example, Jacobs et al., Pharmacology & Therapeutics. 155:1-10, 2015; and Israel et al., Mol Cancer Ther. 4:2037-2044, 2005).

[0158] In certain embodiments, the plasma protein is selected from albumins, globulins, fibrinogens, and clotting factors. In specific embodiments, the albumin is human serum albumin. In some embodiments, the globulin is an alpha 1-globulin (for example, alpha 1-antitrypsin, alpha 1-antichymotrypsin, orosomucoid (acid glycoprotein), serum amyloid A, alpha 1-lipoprotein), an alpha-2 globulin (for example, haptoglobin, alpha-2α-globulin, α2-macroglobulin, ceruloplasmin, thyroxine-binding globulin, alpha 2-antiplasmin, protein C, alpha 2-lipoprotein, angiotensinogen, cortisol binding globulin, or vitamin D-binding protein), a beta-globulin (for example, beta-2 microglobulin, plasminogen, angiostatins, properdin, sex hormone-binding globulin, and transferrin), or a gamma-globulin (in some instances, excluding immunoglobulins).

[0159] In some embodiments, the ECM protein is selected from collagens, elastin proteins, fibronectin, and laminins. In some embodiments, the collagen is fibrillar collagen, for example, Type I, Type II, Type III, Type V, or Type XI fibrillar collagen, or non-fibrillar collagen, for example, Fibril Associated Collagens with Interrupted Triple Helices (FACIT) Type IX, Type XII, Type XIV, Type XIX, or Type XXI collagen, short chain Type VIII or Type X collagen, basement membrane Type IV collagen, multiplexin Type XV or Type XVIII collagen, Membrane Associated Collagens with Interrupted Triple Helices (MACIT) Type XIII or Type XVII collagen, microfibril forming Type VI collage, or anchoring fibril Type VII collagen. In some embodiments, the elastin protein is elastin (UniProt: P15502), fibrillin 1 (UniProt: P35555), fibrillin 2 (UniProt: P35556), or fibrillin 3 (UniProt: Q75N90). In some embodiments, the fibronectin (UniProt: P02751) is soluble plasma fibronectin, or insoluble cellular fibronectin. In some embodiments, the laminin is a lamin trimer selected from LAMA1, LAMA2, LAMA3, LAMA4, LAMA5, LAMB1, LAMB2, LAMB3, LAMB4, LAMC1, LAMC2, and LAMC3, and/or a laminin selected from laminin-111, laminin-211, laminin-121, laminin-221, laminin-332, laminin-3B32, laminin-311, laminin-321, laminin-411, laminin-421, laminin-511, laminin-521, laminin-213, laminin-423, laminin-522, and laminin-523.

[0160] Typically, an ABD comprises a (i) variable heavy chain (VH) region and a CH1 region, and (ii) a variable light chain (VL) region and a CL region, including wherein the CH1 region and the CL region are bound together via a disulfide bond. In some embodiments, an ABD is a fragment antigen-binding domain (Fab), a F(ab′)2 domain, or a whole antibody. Thus, in some embodiments, an ABD comprises an Fc region.

[0161] The ABD can be derived from or composed of any immunoglobulin molecule, and can bind to essentially any cell surface protein that is co-expressed on an immune cell with the IL-12 co-receptors, or any one or more of the plasma proteins or ECM proteins described herein. In some instances, its primary function is to bind to the cell surface protein, plasma protein, or ECM protein, reduce the diffusivity of the attenuated protein homodimer or heterodimer at or near the cell surface of an IL-12 co-receptor expressing cell, and thereby conditionally increase its binding (avidity) to the IL-12 co-receptors on the cell. Thus, the ABD specifically binds to the targeted cell surface receptor, plasma protein, or ECM protein. The ABD or antibody can be of essentially any type. As is well known in the art, an antibody is an immunoglobulin molecule capable of specific binding to a target, through at least one epitope recognition site, located in the variable region of the immunoglobulin molecule.

[0162] The term “antigen-binding fragment” as used herein refers to a polypeptide fragment that contains at least one CDR of an immunoglobulin heavy and/or light chain that binds to the target antigen of interest, that is, the cell surface protein. In this regard, an antigen-binding fragment of the herein described antibodies may comprise 1, 2, 3, 4, 5, or all 6 CDRs of a V_{H} and V_{L} sequence from antibodies that bind to a target antigen.

[0163] The binding properties of ABDs, antibodies, and antigen-binding fragments thereof can be quantified using methods well known in the art (see Davies et al., Annual Rev. Biochem. 59:439-473, 1990). In some embodiments, an ABD or an antibody or antigen-binding fragment thereof specifically binds to an antigen domain or an epitope of a cell surface receptor with an equilibrium dissociation constant that is about or ranges from about ≤10⁻⁷ M to about 10⁻⁸ M. In some embodiments, the equilibrium dissociation constant is about or ranges from about ≤10⁻⁹ M to about ≤10⁻¹⁰ M. In certain illustrative embodiments, an ABD or antibody or antigen-binding fragment thereof has an affinity (Kd or EC₅₀) for a cell surface receptor (to which it specifically binds) of about, at least about, or less than about, 0.01, 0.05, 0.1, 0.2, 0.3, 0.4, 0.5, 0.6, 0.7, 0.8, 0.9, 1, 2, 3, 4, 5, 6, 7, 8, 9, 10, 11, 12, 13, 14, 15, 16, 17, 18, 19, 20, 21, 22, 23, 24, 25, 26, 27, 28, 29, 30, 40, or 50 nM.

[0164] An ABD or antibody is said to exhibit “specific binding” or “preferential binding” if it reacts or associates more frequently, more rapidly, with greater duration and/or with greater affinity with a particular cell, substance, or particular epitope (i.e., antigen domain) than it does with alternative cells, substances, or epitopes. An ABD or antibody “specifically binds” or “preferentially binds” to an antigen domain or epitope of a cell surface protein if it binds with greater affinity, avidity, more readily, and/or with greater duration than it binds to other substances or epitopes, for example, by a statistically significant amount. Typically one member of the pair of molecules that exhibit specific binding has an area on its surface, or a cavity, which specifically binds to and is therefore complementary to a particular spatial and/or polar organization of the other member of the pair of molecules. Thus, the members of the pair have the property of binding specifically to each other. For instance, an ABD or antibody that specifically or preferentially binds to a specific epitope is an ABD or antibody that binds that specific epitope with greater affinity, avidity, more readily, and/or with greater duration than it binds to other epitopes. It is also understood by reading this definition that, for example, an ABD or antibody (or moiety or epitope) that specifically or preferentially binds to a first target may or may not specifically or preferentially bind to a second target. The term is also applicable where, for example, an ABD or antibody is specific for a particular epitope which is carried by a number of antigens, in which case the specific binding member carrying the antigen-binding fragment or domain will be able to bind to the various antigens carrying the epitope; for example, it may be cross reactive to a number of different forms of a target antigen from multiple species that share a common epitope

[0165] Immunological binding generally refers to the non-covalent interactions of the type which occur between an immunoglobulin molecule and an antigen for which the immunoglobulin is specific, for example by way of illustration and not limitation, as a result of electrostatic, ionic, hydrophilic and/or hydrophobic attractions or repulsion, steric forces, hydrogen bonding, van der Waals forces, and other interactions. The strength, or affinity of immunological binding interactions can be expressed in terms of the dissociation constant (Kd) of the interaction, wherein a smaller Kd represents a greater affinity. Immunological binding properties of selected polypeptides can be quantified using methods well known in the art. One such method entails measuring the rates of antigen-binding site/antigen complex formation and dissociation, wherein those rates depend on the concentrations of the complex partners, the affinity of the interaction, and on geometric parameters that equally influence the rate in both directions. Thus, both the “on rate constant” (Kon) and the “off rate constant” (Koff) can be determined by calculation of the concentrations and the actual rates of association and dissociation. The ratio of Koff/Kon enables cancellation of all parameters not related to affinity, and is thus equal to the dissociation constant Kd. As used herein, the term “affinity” includes the equilibrium constant for the reversible binding of two agents and is expressed as Kd or EC₅₀. Affinity of an ABD or antibody for an antigen domain or epitope can be, for example, from about 100 nanomolar (nM) to about 0.1 nM, from about 100 nM to about 1 picomolar (pM), or from about 100 nM to about 1 femtomolar (fM). As used herein, the term “avidity” refers to the accumulated strength of multiple affinities of individual non-covalent binding interactions, such as between a protein receptor and its ligand, and is commonly referred to as “functional affinity”.

[0166] ABDs and other antibodies may be prepared by any of a variety of techniques known to those of ordinary skill in the art. See, e.g., Harlow and Lane, Antibodies: A Laboratory Manual, Cold Spring Harbor Laboratory, 1988. Monoclonal antibodies specific for a polypeptide of interest may be prepared, for example, using the technique of Kohler and Milstein, Eur. J. Immunol. 6:511-519, 1976, and improvements thereto. Also included are methods that utilize transgenic animals such as mice to express human antibodies. See, e.g., Neuberger et al., Nature Biotechnology 14:826, 1996; Lonberg et al., Handbook of Experimental Pharmacology 113:49-101, 1994; and Lonberg et al., Internal Review of Immunology 13:65-93, 1995. Particular examples include the VELOCIMMUNE® platform by REGENEREX® (see, e.g., U.S. Pat. No. 6,596,541).

[0167] In certain embodiments, ABDs and antibodies and antigen-binding fragments thereof as described herein include a heavy chain and a light chain CDR set, respectively interposed between a heavy chain and a light chain framework region (FR) set which provide support to the CDRs and define the spatial relationship of the CDRs relative to each other. As used herein, the term “CDR set” refers to the three hypervariable regions of a heavy or light chain V region. Proceeding from the N-terminus of a heavy or light chain, these regions are denoted as “CDR1,” “CDR2,” and “CDR3” respectively. An antigen-binding site, therefore, includes six CDRs, comprising the CDR set from each of a heavy and a light chain V region. A polypeptide comprising a single CDR, (e.g., a CDR1, CDR2 or CDR3) is referred to herein as a “molecular recognition unit.” Crystallographic analysis of a number of antigen-antibody complexes has demonstrated that the amino acid residues of CDRs form extensive contact with bound antigen, wherein the most extensive antigen contact is with the heavy chain CDR3. Thus, the molecular recognition units are primarily responsible for the specificity of an antigen-binding site.

[0168] As used herein, the term “FR set” refers to the four flanking amino acid sequences which frame the CDRs of a CDR set of a heavy or light chain V region. Some FR residues may contact bound antigen; however, FRs are primarily responsible for folding the V region into the antigen-binding site, particularly the FR residues directly adjacent to the CDRs. Within FRs, certain amino residues and certain structural features are very highly conserved. In this regard, all V region sequences contain an internal disulfide loop of around 90 amino acid residues. When the V regions fold into a binding-site, the CDRs are displayed as projecting loop motifs which form an antigen-binding surface. It is generally recognized that there are conserved structural regions of FRs which influence the folded shape of the CDR loops into certain “canonical” structures-regardless of the precise CDR amino acid sequence. Further, certain FR residues are known to participate in non-covalent interdomain contacts which stabilize the interaction of the antibody heavy and light chains.

[0169] The structures and locations of immunoglobulin variable domains may be determined by reference to Kabat, E. A. et al., Sequences of Proteins of Immunological Interest. 4th Edition. US Department of Health and Human Services. 1987, and updates thereof.

[0170] Also include are “monoclonal” antibodies, and ABDs derived from the same, which refer to a homogeneous antibody population wherein the monoclonal antibody is comprised of amino acids (naturally occurring and non-naturally occurring) that are involved in the selective binding of an epitope. Monoclonal antibodies are highly specific, being directed against a single epitope. The term “monoclonal antibody” encompasses not only intact monoclonal antibodies and full-length monoclonal antibodies, but also fragments thereof (such as ABD, Fab, Fab′, F(ab′)2, Fv), single chain (ScFv), variants thereof, fusion proteins comprising an antigen-binding portion, humanized monoclonal antibodies, chimeric monoclonal antibodies, and any other modified configuration of the immunoglobulin molecule that comprises an antigen-binding fragment (epitope recognition site) of the required specificity and the ability to bind to an epitope. It is not intended to be limited as regards the source of the antibody or the manner in which it is made (e.g., by hybridoma, phage selection, recombinant expression, transgenic animals). The term includes whole immunoglobulins as well as the fragments etc. described above under the definition of “antibody.”

[0171] The proteolytic enzyme papain preferentially cleaves IgG molecules to yield several fragments, two of which (the F(ab) fragments) each comprise a covalent heterodimer that includes an intact antigen-binding site. The enzyme pepsin is able to cleave IgG molecules to provide several fragments, including the F(ab′)2 fragment which comprises both antigen-binding sites. An Fv fragment for use according to certain embodiments can be produced by preferential proteolytic cleavage of an IgM, and on rare occasions of an IgG or IgA immunoglobulin molecule. Fv fragments are, however, more commonly derived using recombinant techniques known in the art. The Fv fragment includes a non-covalent VH:VL heterodimer including an antigen-binding site which retains much of the antigen recognition and binding capabilities of the native antibody molecule. See Inbar et al., PNAS USA. 69:2659-2662, 1972; Hochman et al., Biochem. 15:2706-2710, 1976; and Ehrlich et al., Biochem. 19:4091-4096, 1980.

[0172] Where bispecific antibodies are to be used, or ABDs derived from the same, these may be conventional bispecific antibodies, which can be manufactured in a variety of ways (Holliger and Winter, Current Opinion Biotechnol. 4:446-449, 1993), e.g., prepared chemically or from hybrid hybridomas, or may be any of the bispecific antibody fragments mentioned above. Diabodies and scFv can be constructed without an Fc region, using only variable domains, potentially reducing the effects of anti-idiotypic reaction.

[0173] In certain embodiments, the ABDs or antibodies or antigen-binding fragments thereof are humanized. These embodiments refer to a chimeric molecule, generally prepared using recombinant techniques, having an antigen-binding site derived from an immunoglobulin from a non-human species and the remaining immunoglobulin structure of the molecule based upon the structure and/or sequence of a human immunoglobulin. The antigen-binding site may comprise either complete variable domains fused onto constant domains or only the CDRs grafted onto appropriate framework regions in the variable domains. Epitope binding sites may be wild type or modified by one or more amino acid substitutions. This eliminates the constant region as an immunogen in human individuals, but the possibility of an immune response to the foreign variable region remains (LoBuglio et al., PNAS USA 86:4220-4224, 1989; Queen et al., PNAS USA. 86:10029-10033, 1988; Riechmann et al., Nature. 332:323-327, 1988). Illustrative methods for humanization of antibodies include the methods described in U.S. Pat. No. 7,462,697.

[0174] Another approach focuses not only on providing human-derived constant regions, but modifying the variable regions as well so as to reshape them as closely as possible to human form. It is known that the variable regions of both heavy and light chains contain three complementarity-determining regions (CDRs) which vary in response to the epitopes in question and determine binding capability, flanked by four framework regions (FRs) which are relatively conserved in a given species and which putatively provide a scaffolding for the CDRs. When nonhuman antibodies are prepared with respect to a particular epitope, the variable regions can be “reshaped” or “humanized” by grafting CDRs derived from nonhuman antibody on the FRs present in the human antibody to be modified. Application of this approach to various antibodies has been reported by Sato et al., Cancer Res. 53:851-856, 1993; Riechmann et al., Nature 332:323-327, 1988; Verhoeyen et al., Science 239:1534-1536, 1988; Kettleborough et al., Protein Engineering. 4:773-3783, 1991; Maeda et al., Human Antibodies Hybridoma 2:124-134, 1991; Gorman et al., PNAS USA. 88:4181-4185, 1991; Tempest et al., Bio/Technology 9:266-271, 1991; Co et al., PNAS USA. 88:2869-2873, 1991; Carter et al., PNAS USA. 89:4285-4289, 1992; and Co et al., J Immunol. 148:1149-1154, 1992. In some embodiments, humanized antibodies, and ABDs derived therefrom, preserve all CDR sequences (for example, a humanized mouse antibody which contains all six CDRs from the mouse antibodies). In other embodiments, humanized antibodies have one or more CDRs (one, two, three, four, five, six) which are altered with respect to the original antibody, which are also termed one or more CDRs “derived from” one or more CDRs from the original antibody.

[0175] In certain embodiments, the ABDs or antibodies are “chimeric” antibodies. In this regard, a chimeric antibody is comprised of an antigen-binding fragment of an antibody operably linked or otherwise fused to a heterologous Fc portion of a different antibody. In certain embodiments, the Fc domain or heterologous Fc domain is of human origin. In certain embodiments, the Fc domain or heterologous Fc domain is of mouse origin. In other embodiments, the heterologous Fc domain may be from a different Ig class from the parent antibody, including IgA (including subclasses IgA1 and IgA2), IgD, IgE, IgG (including subclasses IgG1, IgG2, IgG3, and IgG4), and IgM. In further embodiments, the heterologous Fc domain may be comprised of CH2 and CH3 domains from one or more of the different Ig classes. As noted above with regard to humanized antibodies, the antigen-binding fragment of a chimeric antibody may comprise only one or more of the CDRs of the antibodies described herein (e.g., 1, 2, 3, 4, 5, or 6 CDRs of the antibodies described herein), or may comprise an entire variable domain (VL, VH or both).

[0176] It will be appreciated that any one or more of the ABDs can be combined with any of the other P35 proteins, P40 proteins, and linkers described herein, to generate one or more attenuated protein homodimers or heterodimers, or larger, multi-chain structures comprising the same.

[0177] Linkers. As noted above, in certain embodiments, an attenuated protein homodimer or heterodimer comprises one or more linkers, or peptide linkers, including flexible linkers. In some embodiments, a linker is a non-cleavable linker, that is, a physiologically-stable linker, or a stable linker. In some embodiments, a linkers is a cleavable linker, for example, a cleavable linker that comprises a protease cleavage site.

[0178] In some embodiments, a linker is about 1-50 1-40, 1-30, 1-20, 1-10, 1-5, 1-4, 1-3 amino acids in length, or about 1, 2, 3,4, 5,6, 7, 8,9, 10, 11, 12, 13, 14, 15, 16,17, 18, 19, 20, 21, 22, 23, 24, 25, 26, 27, 28, 29, 30, 31, 32, 33, 34, 35, 36, 37, 38, 39, 40, 41, 42, 43, 44, 45, 46, 47, 48, 49, 50 amino acids in length.

[0179] Exemplary stable linker sequences, including flexible linkers, are provided in Table L1.

TABLE L1
Exemplary stable linkers

| | | SEQ ID |
|---|---|---|
| Name | Sequence | NO: |
| | [G]ₓ | |
| | [S]ₓ | |
| | [N]ₓ | |
| | [GS]ₓ | |
| | [GGS]ₓ | |
| | [GSS]ₓ | |
| | [GSGS]ₓ | 20 |
| | [GGSG]ₓ | 21 |
| | [GGGS]ₓ | 22 |
| | [GSGGG]ₓ | 23 |
| | [GGGGS]ₓ | 24 |
| | [GN]ₓ | |
| | [GGN]ₓ | |
| | [GNN]ₓ | |
| | [GNGN]ₓ | 25 |
| | [GGNG]ₓ | 26 |
| | [GGGN]ₓ | 27 |
| | [GGGGN]ₓ | 28 |
| | DGGGS | 29 |
| | TGEKP | 30 |
| | GGRR | 31 |
| | EGKSSGSGSESKVD | 32 |
| | KESGSVSSEQLAQFRSLD | 33 |
| | GGRRGGGS | 34 |
| | LRQRDGERP | 35 |
| | LRQKDGGGSERP | 36 |
| | LRQKD(GGGS)₂ERP | 37 |
| | GGGGENLYFQGGGGS | 38 |
| | GGGGSENLYFQGGGSGGGGS | 39 |
| | GGSPLGLAGGGS | |
| | GGSGGPLGLAGSGRSDNRGGA | 41 |
| | GGGGSGGGGSENLYFQGGGSGGGGS | 42 |
| | GGGGSPLGLAGSGRSDNRGSGGGGS | 43 |

where ₓ is 1, 2, 3, 4, 5, 6, 7, 8, 9, 10, 11, 12, 13, 14, 15, 16, 17, 18, 19, or 20

[0180] Thus, in certain embodiment, a stable and/or flexible linker is selected from Table L1. In particular embodiments, flexible linkers can be rationally designed using a computer program capable of modeling both DNA-binding sites and the peptides themselves (Desjarlais & Berg, PNAS. 90:2256-2260, 1993; and PNAS. 91:11099-11103, 1994) or by phage display methods.

[0181] In some embodiments, a cleavable linker comprises at least one protease cleavage site, or is a low pH-sensitive linker. Suitable protease cleavages sites and self-cleaving peptides are known to the skilled person (see, e.g., Ryan et al., J. Gener. Virol. 78:699-722, 1997; and Scymczak et al., Nature Biotech. 5:589-594, 2004). In some embodiments, the protease cleavage site is cleavable by a protease selected from one or more of a metalloprotease, a serine protease, a cysteine protease, and an aspartic acid protease. In particular embodiments, the protease cleavage site is cleavable by a protease selected from one or more of MMP1, MMP2, MMP3, MMP4, MMP5, MMP6, MMP7, MMP8, MMP9, MMP10, MMP11, MMP12, MMP13, MMP14, TEV protease, matriptase, uPA, FAP, Legumain, PSA, Kallikrein, Cathepsin A, and Cathepsin B.

[0182] Exemplary cleavable linker sequences are provided in Table L2. PGP-24 DNA

TABLE L2
Exemplary cleavable linkers

| | | SEQ ID |
|---|---|---|
| Name | Sequence | NO: |
| | PLGLA | 44 |
| | GPLGVR | 45 |
| | SGRSDNH | 46 |
| | SGRSDNQ | 47 |
| | SGRSDNR | 48 |
| | SGRSDNS | 49 |
| | SGRSDNT | 50 |

[0183] Thus, in certain embodiment, a cleavable linker is selected from Table L2. In particular embodiments, a cleavable linker has a half life at pH 7.4, 25° C., for example, at physiological pH, human body temperature (e.g., in vivo, in serum, in a given tissue), of about or less than about 30 minutes, 1 hour, 2 hours, 3 hours, 4 hours, 5 hours, 6 hours, 12 hours, 18 hours, 24 hours, 36 hours, 48 hours, 72 hours, or 96 hours, or any intervening half-life.

[0184] It will be appreciated that any one or more of the foregoing linkers can be combined with any of p35 proteins, p40 proteins, and/or ABDs described herein, to generate one or more attenuated protein homodimers or heterodimers, or larger, multi-chain structures comprising the same

[0185] Additional Domains. Certain attenuated protein homodimers or heterodimers comprise one or more additional domains, for example, binding domains. In some embodiments, each of polypeptides in an attenuated protein homodimer or heterodimer further comprise one or more protein domains at a free terminus.

[0186] In particular embodiments, the protein domains are selected from one or more of cell receptor targeting moieties optionally bi-specific targeting moieties, antigen binding domains optionally bi-specific antigen binding domains, cell membrane receptor extracellular domains (ECDs), Fc domains, human serum albumin (HSA), Fc binding domains, HSA binding domains, cytokines, chemokines, and soluble protein ligands.

[0187] In some embodiments, the one or more additional protein domains can be used to form complexes of two, three, four, five, or more attenuated protein homodimers or heterodimers, which are bound to together via the additional domain(s).

[0188] Exemplary attenuated protein homodimers are provided in Table S3.

TABLE S
Exemplary Attenuated Fusion Proteins

| | | |
|---|---|---|
| | | SEQ ID |
| Name | Sequence | NO: |

P3074

| | | |
|---|---|---|
| Chains 1 | RNLPVATPDPGMFPCLHHSQNLLRAVSNMLQKARQTLEFYPCTSEEIDHEDI | 51 |
| and 2 | TKDKTSTVEACLPLELTKNESCLNSRETSFITNGSCLASRKTSFMMALCLSS | |
| | IYEDLKMYQVEFKTMNAKLLMDPKRQIFLDQNMLAVIDELMQALNFNSETVP | |
| | QKSSLEEPDFYKTKIKLCILLHAFRIRAVTIDRVMSYLNAS [symbol] | |
| | [symbol] IWELKKDVYVVELDWYPDAPGEMVVLTCDTPEEDGITWTLDQSSEVLG | |
| | SGKTLTIQVKEFGDAGQYTCHKGGEVLSHSLLLLHKKEDGIWSTDILKDQKE | |
| | PKNKTFLRCEAKNYSGRFTCWWLTTISTDLTFSVKSSRGSSDPQGVTCGAAT | |
| | LSAERVRGDNKEYEYSVECQEDSACPAAEESLPIEVMVDAVHKLKYENYTSS | |
| | FFIRDIIKPDPPKNLQLKPLKNSRQVEVSWEYPDTWSTPHSYFSLTFCVQVQ | |
| | GQDQDEKKDRVFTDKTSATVICRKNASISVRAQDRYYSSSWSEWASVPCS | |

P3075

| | | |
|---|---|---|
| Chains 1 | RNLPVATPDPGMFPCLHHSQNLLRAVSNMLQKARQTLEFYPCTSEEIDHEDI | 52 |
| and 2 | TKDKTSTVEACLPLELTKNESCLNSRETSFITNGSCLASRKTSEMMALCLSS | |
| | IYEDLKMYQVEFKTMNAKLLMDPKRQIFLDQNMLAVIDELMQALNFNSETVP | |
| | QKSSLEEPDFYKTKIKLCILLHAFRIRAVTIDRVMSYLNAS [symbol] | |
| | [symbol] IWELKKDVYVVELDWYPDAPGEMVVLTCDTPEEDGITWTLDQS | |
| | SEVLGSGKTLTIQVKEFGDAGQYTCHKGGEVLSHSLLLLHKKEDGIWSTDIL | |
| | KDQKEPKNKTFLRCEAKNYSGRFTCWWLTTISTDLTFSVKSSRGSSDPQGVT | |
| | CGAATLSAERVRGDNKEYEYSVECQEDSACPAAEESLPIEVMVDAVHKLKYE | |
| | NYTSSFFIRDIIKPDPPKNLQLKPLKNSRQVEVSWEYPDTWSTPHSYESLTF | |
| | CVQVQGQDQDEKKDRVFTDKTSATVICRKNASISVRAQDRYYSSSWSEWASV | |
| | PCS | |

P3076

| | | |
|---|---|---|
| Chains 1 | RNLPVATPDPGMFPCLHHSQNLLRAVSNMLQKARQTLEFYPCTSEEIDHEDI | 53 |
| and 2 | TKDKTSTVEACLPLELTKNESCLNSRETSFITNGSCLASRKTSEMMALCLSS | |
| | IYEDLKMYQVEFKTMNAKLLMDPKRQIFLDQNMLAVIDELMQALNFNSETVP | |
| | QKSSLEEPDFYKTKIKLCILLHAFRIRAVTIDRVMSYLNAS [symbol] | |
| | [symbol] IWELKKDVYVVELDWYPDAPGEMVVLTCDTPEEDGITW | |
| | TLDQSSEVLGSGKTLTIQVKEFGDAGQYTCHKGGEVLSHSLLLLHKKEDGIW | |
| | STDILKDQKEPKNKTFLRCEAKNYSGRFTCWWLTTISTDLTFSVKSSRGSSD | |
| | PQGVTCGAATLSAERVRGDNKEYEYSVECQEDSACPAAEESLPIEVMVDAVH | |
| | KLKYENYTSSFFIRDIIKPDPPKNLQLKPLKNSRQVEVSWEYPDTWSTPHSY | |
| | FSLTFCVQVQGQDQDEKKDRVFTDKTSATVICRKNASISVRAQDRYYSSSWS | |
| | EWASVPCS | |

P3077

| | | |
|---|---|---|
| Chains 1 | RNLPVATPDPGMFPCLHHSQNLLRAVSNMLQKARQTLEFYPCTSEEIDHEDI | 54 |
| and 2 | TKDKTSTVEACLPLELTKNESSLNSRETSFITNGSCLASRKTSEMMALCLSS | |
| | IYEDLKMYQVEFKTMNAKLLMDPKRQIFLDQNMLAVIDELMQALNFNSETVP | |
| | QKSSLEEPDFYKTKIKLCILLHAFRIRAVTIDRVMSYLNAS [symbol] | |
| | [symbol] IWELKKDVYVVELDWYPDAPGEMVVLTCDTPEEDGITWTLDQSSEVLG | |
| | SGKTLTIQVKEFGDAGQYTCHKGGEVLSHSLLLLHKKEDGIWSTDILKDQKE | |
| | PKNKTFLRCEAKNYSGRFTCWWLTTISTDLTFSVKSSRGSSDPQGVTCGAAT | |
| | LSAERVRGDNKEYEYSVECQEDSAAPAAEESLPIEVMVDAVHKLKYENYTSS | |
| | FFIRDIIKPDPPKNLQLKPLKNSRQVEVSWEYPDTWSTPHSYFSLTFCVQVQ | |
| | GQDQDEKKDRVFTDKTSATVICRKNASISVRAQDRYYSSSWSEWASVPCS | |

P3078

| | | |
|---|---|---|
| Chains 1 | RNLPVATPDPGMFPCLHHSQNLLRAVSNMLQKARQTLEFYPCTSEEIDHEDI | 55 |
| and 2 | TKDKTSTVEACLPLELTKNESSLNSRETSFITNGSCLASRKTSFMMALCLSS | |
| | IYEDLKMYQVEFKTMNAKLLMDPKRQIFLDQNMLAVIDELMQALNFNSETVP | |
| | QKSSLEEPDFYKTKIKLCILLHAFRIRAVTIDRVMSYLNAS [symbol] | |
| | [symbol] IWELKKDVYVVELDWYPDAPGEMVVLTCDTPEEDGITWTLDQS | |
| | SEVLGSGKTLTIQVKEFGDAGQYTCHKGGEVLSHSLLLLHKKEDGIWSTDIL | |
| | KDQKEPKNKTFLRCEAKNYSGRFTCWWLTTISTDLTFSVKSSRGSSDPQGVT | |
| | CGAATLSAERVRGDNKEYEYSVECQEDSAAPAAEESLPIEVMVDAVHKLKYE | |
| | NYTSSFFIRDIIKPDPPKNLQLKPLKNSRQVEVSWEYPDTWSTPHSYESLTF | |
| | CVQVQGQDQDEKKDRVFTDKTSATVICRKNASISVRAQDRYYSSSWSEWASV | |
| | PCS | |

P3079

| | | |
|---|---|---|
| Chains 1 | RNLPVATPDPGMFPCLHHSQNLLRAVSNMLQKARQTLEFYPCTSEEIDHEDI | 56 |
| and 2 | TKDKTSTVEACLPLELTKNESSLNSRETSFITNGSCLASRKTSEMMALCLSS | |
| | IYEDLKMYQVEFKTMNAKLLMDPKRQIFLDQNMLAVIDELMQALNFNSETVP | |
| | QKSSLEEPDFYKTKIKLCILLHAFRIRAVTIDRVMSYLNAS [symbol] | |
| | [symbol] IWELKKDVYVVELDWYPDAPGEMVVLTCDTPEEDGITW | |
| | TLDQSSEVLGSGKTLTIQVKEFGDAGQYTCHKGGEVLSHSLLLLHKKEDGIW | |
| | STDILKDQKEPKNKTFLRCEAKNYSGRFTCWWLTTISTDLTFSVKSSRGSSD | |
| | PQGVTCGAATLSAERVRGDNKEYEYSVECQEDSAAPAAEESLPIEVMVDAVH | |
| | KLKYENYTSSFFIRDIIKPDPPKNLQLKPLKNSRQVEVSWEYPDTWSTPHSY | |
| | FSLTFCVQVQGQDQDEKKDRVFTDKTSATVICRKNASISVRAQDRYYSSSWS | |
| | EWASVPCS | |

P3080

| | | |
|---|---|---|
| Chains 1 | RNLPVATPDPGMFPCLHHSQNLLRAVSNMLQKARQTLEFYPCTSEEIDHEDI | 57 |
| and 2 | TKDKTSTVEACLPLELTKNESSLNSRETSFITNGSCLASRKTSFMMALCLSS | |
| | IYEDLKMYQVEFKTMNAKLLMDPKRQIFLDQNMLAVIDELMQALNFNSETVP | |
| | QKSSLEEPDFYKTKIKLCILLHAFRIRAVTIDRVMSYLNAS [symbol] | |
| | [symbol] IWELKKDVYVVELDWYPDAPGEMVVLTCDTPEEDGITWTLDQSSEVLG | |
| | SGKTLTIQVKEFGDAGQYTCHKGGEVLSHSLLLLHKKEDGIWSTDILKDQKE | |
| | PKNKTFLRCEAKNFSGRFTCWWLTTISTDLTFSVKSSRGSSDPQGVTCGAAT | |
| | LSAERVRGDNKEYEYSVECQEDSAAPAAEESLPIEVMVDAVHKLKYENYTSS | |
| | FFIRDIIKPDPPKNLQLKPLKNSRQVEVSWEYPDTWSTPHSYFSLTFCVQVQ | |
| | GQDQDEKKDRVFTDKTSATVICRKNASISVRAQDRYYSSSWSEWASVPCS | |

P3081

| | | |
|---|---|---|
| Chains 1 | RNLPVATPDPGMFPCLHHSQNLLRAVSNMLQKARQTLEFYPCTSEEIDHEDI | 58 |
| and 2 | TKDKTSTVEACLPLELTKNESSLNSRETSFITNGSCLASRKTSFMMALCLSS | |
| | IYEDLKMYQVEFKTMNAKLLMDPKRQIFLDQNMLAVIDELMQALNFNSETVP | |
| | QKSSLEEPDFYKTKIKLCILLHAFRIRAVTIDRVMSYLNAS [symbol] | |
| | [symbol] IWELKKDVYVVELDWYPDAPGEMVVLTCDTPEEDGITWTLDQS | |
| | SEVLGSGKTLTIQVKEFGDAGQYTCHKGGEVLSHSLLLLHKKEDGIWSTDIL | |
| | KDQKEPKNKTFLRCEAKNFSGRFTCWWLTTISTDLTFSVKSSRGSSDPQGVT | |
| | CGAATLSAERVRGDNKEYEYSVECQEDSAAPAAEESLPIEVMVDAVHKLKYE | |
| | NYTSSFFIRDIIKPDPPKNLQLKPLKNSRQVEVSWEYPDTWSTPHSYFSLTF | |
| | CVQVQGQDQDEKKDRVFTDKTSATVICRKNASISVRAQDRYYSSSWSEWASV | |
| | PCS | |

P3082

| | | |
|---|---|---|
| Chains 1 | RNLPVATPDPGMFPCLHHSQNLLRAVSNMLQKARQTLEFYPCTSEEIDHEDI | 59 |
| and 2 | TKDKTSTVEACLPLELTKNESSLNSRETSFITNGSCLASRKTSFMMALCLSS | |
| | IYEDLKMYQVEFKTMNAKLLMDPKRQIFLDQNMLAVIDELMQALNFNSETVP | |
| | QKSSLEEPDFYKTKIKLCILLHAFRIRAVTIDRVMSYLNAS [symbol] | |
| | [symbol] IWELKKDVYVVELDWYPDAPGEMVVLTCDTPEEDGITW | |
| | TLDQSSEVLGSGKTLTIQVKEFGDAGQYTCHKGGEVLSHSLLLLHKKEDGIW | |
| | STDILKDQKEPKNKTFLRCEAKNFSGRFTCWWLTTISTDLTESVKSSRGSSD | |
| | PQGVTCGAATLSAERVRGDNKEYEYSVECQEDSAAPAAEESLPIEVMVDAVH | |
| | KLKYENYTSSFFIRDIIKPDPPKNLQLKPLKNSRQVEVSWEYPDTWSTPHSY | |
| | FSLTFCVQVQGQDQDEKKDRVFTDKTSATVICRKNASISVRAQDRYYSSSWS | |
| | EWASVPCS | |

P3083

| | | |
|---|---|---|
| Chains 1 | EPKSSDKTHTCPPCPAPEAAGGPSVFLFPPKPKDTLMISRTPEVTCVVVDVS | 60 |
| and 2 | HEDPEVKFNWYVDGVEVHNAKTKPREEQYNSTYRVVSVLTVLHQDWLNGKEY | |
| | KCKVSNKALAAPIEKTISKAKGQPREPQVYTLPPSRDELTKNQVSLTCLVKG | |
| | FYPSDIAVEWESNGQPENNYKTTPPVLDSDGSFFLYSKLTVDKSRWQQGNVE | |
| | SCSVMHEALHNHYTQKSLSLSPG [symbol] RNLPVATPDPGMFPCLH | |
| | HSQNLLRAVSNMLQKARQTLEFYPCTSEEIDHEDITKDKTSTVEACLPLELT | |
| | KNESSLNSRETSFITNGSCLASRKTSFMMALCLSSIYEDLKMYQVEFKTMNA | |
| | KLLMDPKRQIFLDQNMLAVIDELMQALNFNSETVPQKSSLEEPDFYKTKIKL | |
| | CILLHAFRIRAVTIDRVMSYLNAS [symbol] IWELKKDVYVVEL | |
| | DWYPDAPGEMVVLTCDTPEEDGITWTLDQSSEVLGSGKTLTIQVKEFGDAGQ | |
| | YTCHKGGEVLSHSLLLLHKKEDGIWSTDILKDQKEPKNKTFLRCEAKNYSGR | |
| | FTCWWLTTISTDLTFSVKSSRGSSDPQGVTCGAATLSAERVRGDNKEYEYSV | |
| | ECQEDSAAPAAEESLPIEVMVDAVHKLKYENYTSSFFIRDIIKPDPPKNLQL | |
| | KPLKNSRQVEVSWEYPDTWSTPHSYFSLTFCVQVQGQDQDEKKDRVFTDKTS | |
| | ATVICRKNASISVRAQDRYYSSSWSEWASVPCS | |

P3084

| | | |
|---|---|---|
| Chains 1 | EPKSSDKTHTCPPCPAPEAAGGPSVFLFPPKPKDTLMISRTPEVTCVVVDVS | 61 |
| and 2 | HEDPEVKFNWYVDGVEVHNAKTKPREEQYNSTYRVVSVLTVLHQDWLNGKEY | |
| | KCKVSNKALAAPIEKTISKAKGQPREPQVYTLPPSRDELTKNQVSLTCLVKG | |
| | FYPSDIAVEWESNGQPENNYKTTPPVLDSDGSFFLYSKLTVDKSRWQQGNVF | |
| | SCSVMHEALHNHYTQKSLSLSPG [symbol] RNLPVATPDPGMFPCLH | |
| | HSQNLLRAVSNMLQKARQTLEFYPCTSEEIDHEDITKDKTSTVEACLPLELT | |
| | KNESSLNSRETSFITNGSCLASRKTSFMMALCLSSIYEDLKMYQVEFKTMNA | |
| | KLLMDPKRQIFLDQNMLAVIDELMQALNFNSETVPQKSSLEEPDFYKTKIKL | |
| | CILLHAFRIRAVTIDRVMSYLNAS [symbol] IWELKKDV | |
| | YVVELDWYPDAPGEMVVLTCDTPEEDGITWTLDQSSEVLGSGKTLTIQVKEF | |
| | GDAGQYTCHKGGEVLSHSLLLLHKKEDGIWSTDILKDQKEPKNKTFLRCEAK | |
| | NYSGRFTCWWLTTISTDLTFSVKSSRGSSDPQGVTCGAATLSAERVRGDNKE | |
| | YEYSVECQEDSAAPAAEESLPIEVMVDAVHKLKYENYTSSFFIRDIIKPDPP | |
| | KNLQLKPLKNSRQVEVSWEYPDTWSTPHSYFSLTFCVQVQGQDQDEKKDRVE | |
| | TDKTSATVICRKNASISVRAQDRYYSSSWSEWASVPCS | |

P3085

| | | |
|---|---|---|
| Chains 1 | EPKSSDKTHTCPPCPAPEAAGGPSVFLFPPKPKDTLMISRTPEVTCVVVDVS | 62 |
| and 2 | HEDPEVKFNWYVDGVEVHNAKTKPREEQYNSTYRVVSVLTVLHQDWLNGKEY | |
| | KCKVSNKALAAPIEKTISKAKGQPREPQVYTLPPSRDELTKNQVSLTCLVKG | |
| | FYPSDIAVEWESNGQPENNYKTTPPVLDSDGSFFLYSKLTVDKSRWQQGNVF | |
| | SCSVMHEALHNHYTQKSLSLSP [symbol] RNLPVATPDPGMFPCLH | |
| | HSQNLLRAVSNMLQKARQTLEFYPCTSEEIDHEDITKDKTSTVEACLPLELT | |
| | KNESSLNSRETSFITNGSCLASRKTSFMMALCLSSIYEDLKMYQVEFKTMNA | |
| | KLLMDPKRQIFLDQNMLAVIDELMQALNFNSETVPQKSSLEEPDFYKTKIKL | |
| | CILLHAFRIRAVTIDRVMSYLNAS [symbol] IWE | |
| | LKKDVYVVELDWYPDAPGEMVVLTCDTPEEDGITWTLDQSSEVLGSGKTLTI | |
| | QVKEFGDAGQYTCHKGGEVLSHSLLLLHKKEDGIWSTDILKDQKEPKNKTFL | |
| | RCEAKNYSGRFTCWWLTTISTDLTFSVKSSRGSSDPQGVTCGAATLSAERVR | |
| | GDNKEYEYSVECQEDSAAPAAEESLPIEVMVDAVHKLKYENYTSSFFIRDII | |
| | KPDPPKNLQLKPLKNSRQVEVSWEYPDTWSTPHSYFSLTFCVQVQGQDQDEK | |
| | KDRVFTDKTSATVICRKNASISVRAQDRYYSSSWSEWASVPCS | |

P30952158

| | | |
|---|---|---|
| Chains 1 | QVQLVQSGAEVKKPGASVKVSCKASGYTFTMNIIHWVRQAPGQGLEWMGWIH | 63 |
| and 2 | PGSGAIKYAQKLQGRVTMTTDTSTSTAYMELRSLRSDDTAVYYCARHGGTGR | |
| | GAMDYWGQGTLVTVSSASTKGPSVFPLAPSSKSTSGGTAALGCLVKDYFPEP | |
| | VTVSWNSGALTSGVHTFPAVLQSSGLYSLSSVVTVPSSSLGTQTYICNVNHK | |
| | PSNTKVDKKVEPKSCDKTHTCPPCPAPEAAGGPSVFLFPPKPKDTLMISRTP | |
| | EVTCVVVDVSHEDPEVKFNWYVDGVEVHNAKTKPREEQYNSTYRVVSVLTVL | |
| | HQDWLNGKEYKCKVSNKALAAPIEKTISKAKGQPREPQVYTLPPSRDELTKN | |
| | QVSLTCLVKGFYPSDIAVEWESNGQPENNYKTTPPVLDSDGSFFLYSKLTVD | |
| | KSRWQQGNVFSCSVMHEALHNHYTQKSLSLSPG [symbol] RNLPVATPDPGMFP | |
| | CLHHSQNLLRAVSNMLQKARQTLEFYPCTSEEIDHEDITKDKTSTVEACLPL | |
| | ELTKNESSLNSRETSFITNGSCLASRKTSFMMALCLSSIYEDLKMYQVEFKT | |
| | MNAKLLMDPKRQIFLDQNMLAVIDELMQALNFNSETVPQKSSLEEPDFYKTK | |
| | IKLCILLHAFRIRAVTIDRVMSYLNAS [symbol] IWEL | |
| | KKDVYVVELDWYPDAPGEMVVLTCDTPEEDGITWTLDQSSEVLGSGKTLTIQ | |
| | VKEFGDAGQYTCHKGGEVLSHSLLLLHKKEDGIWSTDILKDQKEPKNKTFLR | |
| | CEAKNYSGRFTCWWLTTISTDLTFSVKSSRGSSDPQGVTCGAATLSAERVRG | |
| | DNKEYEYSVECQEDSAAPAAEESLPIEVMVDAVHKLKYENYTSSFFIRDIIK | |
| | PDPPKNLQLKPLKNSRQVEVSWEYPDTWSTPHSYFSLTFCVQVQGQDQDEKK | |
| | DRVFTDKTSATVICRKNASISVRAQDRYYSSSWSEWASVPCS | |
| Chains 3 | EIVLTQSPGTLSLSPGERATLSCRASQSVSTSAYSYMHWYQQKPGQAPRLLI | 64 |
| and 4 | YLASNLESGIPDRFSGSGSGTDFTLTISRLEPEDFAVYYCQQSRELPYTFGQ | |
| | GTKLEIKRTVAAPSVFIFPPSDEQLKSGTASVVCLLNNFYPREAKVQWKVDN | |
| | ALQSGNSQESVTEQDSKDSTYSLSSTLTLSKADYEKHKVYACEVTHQGLSSP | |
| | VTKSFNRGEC | |

P30962158

| | | |
|---|---|---|
| Chains 1 | QVQLVQSGAEVKKPGASVKVSCKASGYTFTMNIIHWVRQAPGQGLEWMGWIH | 65 |
| and 2 | PGSGAIKYAQKLQGRVTMTTDTSTSTAYMELRSLRSDDTAVYYCARHGGTGR | |
| | GAMDYWGQGTLVTVSSASTKGPSVFPLAPSSKSTSGGTAALGCLVKDYFPEP | |
| | VTVSWNSGALTSGVHTFPAVLQSSGLYSLSSVVTVPSSSLGTQTYICNVNHK | |
| | PSNTKVDKKVEPKSCDK [symbol] RNLPVATPDPGMFPCLHHSQNLLRAVSNML | |
| | QKARQTLEFYPCTSEEIDHEDITKDKTSTVEACLPLELTKNESSLNSRETSF | |
| | ITNGSCLASRKTSFMMALCLSSIYEDLKMYQVEFKTMNAKLLMDPKRQIFLD | |
| | QNMLAVIDELMQALNFNSETVPQKSSLEEPDFYKTKIKLCILLHAFRIRAVT | |
| | IDRVMSYLNAS [symbol] IWELKKDVYVVELDWYPDAP | |
| | GEMVVLTCDTPEEDGITWTLDQSSEVLGSGKTLTIQVKEFGDAGQYTCHKGG | |
| | EVLSHSLLLLHKKEDGIWSTDILKDQKEPKNKTFLRCEAKNYSGRFTCWWLT | |
| | TISTDLTFSVKSSRGSSDPQGVTCGAATLSAERVRGDNKEYEYSVECQEDSA | |
| | APAAEESLPIEVMVDAVHKLKYENYTSSFFIRDIIKPDPPKNLQLKPLKNSR | |
| | QVEVSWEYPDTWSTPHSYFSLTFCVQVQGQDQDEKKDRVFTDKTSATVICRK | |
| | NASISVRAQDRYYSSSWSEWASVPCS | |
| Chains 3 | EIVLTQSPGTLSLSPGERATLSCRASQSVSTSAYSYMHWYQQKPGQAPRLLI | 66 |
| and 4 | YLASNLESGIPDRFSGSGSGTDFTLTISRLEPEDFAVYYCQQSRELPYTFGQ | |
| | GTKLEIKRTVAAPSVFIFPPSDEQLKSGTASVVCLLNNFYPREAKVQWKVDN | |
| | ALQSGNSQESVTEQDSKDSTYSLSSTLTLSKADYEKHKVYACEVTHQGLSSP | |
| | VTKSFNRGEC | |

P30972158

| | | |
|---|---|---|
| Chains 1 | QVQLVQSGAEVKKPGASVKVSCKASGYTFTMNIIHWVRQAPGQGLEWMGWIH | 67 |
| and 2 | PGSGAIKYAQKLQGRVTMTTDTSTSTAYMELRSLRSDDTAVYYCARHGGTGR | |
| | GAMDYWGQGTLVTVSSASTKGPSVFPLAPSSKSTSGGTAALGCLVKDYFPEP | |
| | VTVSWNSGALTSGVHTFPAVLQSSGLYSLSSVVTVPSSSLGTQTYICNVNHK | |
| | PSNTKVDKKVEPKSCDK [symbol] RNLPVATPDPGMFPCLHHSQNLLRA | |
| | VSNMLQKARQTLEFYPCTSEEIDHEDITKDKTSTVEACLPLELTKNESSLNS | |
| | RETSFITNGSCLASRKTSFMMALCLSSIYEDLKMYQVEFKTMNAKLLMDPKR | |
| | QIFLDQNMLAVIDELMQALNFNSETVPQKSSLEEPDFYKTKIKLCILLHAFR | |
| | IRAVTIDRVMSYLNAS [symbol] IWELKKDVYVVELDW | |
| | YPDAPGEMVVLTCDTPEEDGITWTLDQSSEVLGSGKTLTIQVKEFGDAGQYT | |
| | CHKGGEVLSHSLLLLHKKEDGIWSTDILKDQKEPKNKTFLRCEAKNYSGRFT | |
| | CWWLTTISTDLTFSVKSSRGSSDPQGVTCGAATLSAERVRGDNKEYEYSVEC | |
| | QEDSAAPAAEESLPIEVMVDAVHKLKYENYTSSFFIRDIIKPDPPKNLQLKP | |
| | LKNSRQVEVSWEYPDTWSTPHSYFSLTFCVQVQGQDQDEKKDRVFTDKTSAT | |
| | VICRKNASISVRAQDRYYSSSWSEWASVPCS | |
| Chains 3 | EIVLTQSPGTLSLSPGERATLSCRASQSVSTSAYSYMHWYQQKPGQAPRLLI | 68 |
| and 4 | YLASNLESGIPDRFSGSGSGTDFTLTISRLEPEDFAVYYCQQSRELPYTFGQ | |
| | GTKLEIKRTVAAPSVFIFPPSDEQLKSGTASVVCLLNNFYPREAKVQWKVDN | |
| | ALQSGNSQESVTEQDSKDSTYSLSSTLTLSKADYEKHKVYACEVTHQGLSSP | |
| | VTKSFNRGEC | |

P30982158

| | | |
|---|---|---|
| Chains 1 | QVQLVQSGAEVKKPGASVKVSCKASGYTFTMNIIHWVRQAPGQGLEWMGWIH | 69 |
| and 2 | PGSGAIKYAQKLQGRVTMTTDTSTSTAYMELRSLRSDDTAVYYCARHGGTGR | |
| | GAMDYWGQGTLVTVSSASTKGPSVFPLAPSSKSTSGGTAALGCLVKDYFPEP | |
| | VTVSWNSGALTSGVHTFPAVLQSSGLYSLSSVVTVPSSSLGTQTYICNVNHK | |
| | PSNTKVDKKVEPKSCDK [symbol] RNLPVATPDPGMFPCLHHSQ | |
| | NLLRAVSNMLQKARQTLEFYPCTSEEIDHEDITKDKTSTVEACLPLELTKNE | |
| | SSLNSRETSFITNGSCLASRKTSFMMALCLSSIYEDLKMYQVEFKTMNAKLL | |
| | MDPKRQIFLDQNMLAVIDELMQALNFNSETVPQKSSLEEPDFYKTKIKLCIL | |
| | LHAFRIRAVTIDRVMSYLNAS [symbol] IWELKKDVYV | |
| | VELDWYPDAPGEMVVLTCDTPEEDGITWTLDQSSEVLGSGKTLTIQVKEFGD | |
| | AGQYTCHKGGEVLSHSLLLLHKKEDGIWSTDILKDQKEPKNKTFLRCEAKNY | |
| | SGRFTCWWLTTISTDLTFSVKSSRGSSDPQGVTCGAATLSAERVRGDNKEYE | |
| | YSVECQEDSAAPAAEESLPIEVMVDAVHKLKYENYTSSFFIRDIIKPDPPKN | |
| | LQLKPLKNSRQVEVSWEYPDTWSTPHSYFSLTFCVQVQGQDQDEKKDRVFTD | |
| | KTSATVICRKNASISVRAQDRYYSSSWSEWASVPCS | |
| Chains 3 | EIVLTQSPGTLSLSPGERATLSCRASQSVSTSAYSYMHWYQQKPGQAPRLLI | 70 |
| and 4 | YLASNLESGIPDRFSGSGSGTDFTLTISRLEPEDFAVYYCQQSRELPYTEGQ | |
| | GTKLEIKRTVAAPSVFIFPPSDEQLKSGTASVVCLLNNFYPREAKVQWKVDN | |
| | ALQSGNSQESVTEQDSKDSTYSLSSTLTLSKADYEKHKVYACEVTHQGLSSP | |
| | VTKSFNRGEC | |

P30991942

| | | |
|---|---|---|
| Chains 1 | QVQLVQSGAEVKKPGSSVKVSCKTSGDTFSTYAISWVRQAPGQGLEWMGGII | 71 |
| and 2 | PIFGKAHYAQKFQGRVTITADESTSTAYMELSSLRSEDTAVYFCARKFHFVS | |
| | GSPFGMDVWGQGTTVTVSSASTKGPSVFPLAPCSRSTSESTAALGCLVKDYF | |
| | PEPVTVSWNSGALTSGVHTFPAVLQSSGLYSLSSVVTVPSSSLGTKTYTCNV | |
| | DHKPSNTKVDKRVESKYGPPCPPCPAPEFLGGPSVFLFPPKPKDTLMISRTP | |
| | EVTCVVVDVSQEDPEVQFNWYVDGVEVHNAKTKPREEQFNSTYRVVSVLTVL | |
| | HQDWLNGKEYKCKVSNKGLPSSIEKTISKAKGQPREPQVYTLPPSQEEMTKN | |
| | QVSLTCLVKGFYPSDIAVEWESNGQPENNYKTTPPVLDSDGSFFLYSRLTVD | |
| | KSRWQEGNVFSCSVMHEALHNHYTQKSLSLSL [symbol] RNLPVATPDPGMFP | |
| | CLHHSQNLLRAVSNMLQKARQTLEFYPCTSEEIDHEDITKDKTSTVEACLPL | |
| | ELTKNESSLNSRETSFITNGSCLASRKTSFMMALCLSSIYEDLKMYQVEFKT | |
| | MNAKLLMDPKRQIFLDQNMLAVIDELMQALNFNSETVPQKSSLEEPDFYKTK | |
| | IKLCILLHAFRIRAVTIDRVMSYLNAS [symbol] IWEL | |
| | KKDVYVVELDWYPDAPGEMVVLTCDTPEEDGITWTLDQSSEVLGSGKTLTIQ | |
| | VKEFGDAGQYTCHKGGEVLSHSLLLLHKKEDGIWSTDILKDQKEPKNKTFLR | |
| | CEAKNYSGRFTCWWLTTISTDLTFSVKSSRGSSDPQGVTCGAATLSAERVRG | |
| | DNKEYEYSVECQEDSAAPAAEESLPIEVMVDAVHKLKYENYTSSFFIRDIIK | |
| | PDPPKNLQLKPLKNSRQVEVSWEYPDTWSTPHSYFSLTFCVQVQGQDQDEKK | |
| | DRVFTDKTSATVICRKNASISVRAQDRYYSSSWSEWASVPCS | |
| Chains 3 | EIVLTQSPATLSLSPGERATLSCRASQSVSSYLAWYQQKPGQAPRLLIYDAS | 72 |
| and 4 | NRATGIPARFSGSGSGTDFTLTISSLEPEDFAVYYCQQRSNWPTFGQGTKVE | |
| | IKRTVAAPSVFIFPPSDEQLKSGTASVVCLLNNFYPREAKVQWKVDNALQSG | |
| | NSQESVTEQDSKDSTYSLSSTLTLSKADYEKHKVYACEVTHQGLSSPVTKSF | |
| | NRGEC | |

P31001942

| | | |
|---|---|---|
| Chains 1 | QVQLVQSGAEVKKPGSSVKVSCKTSGDTFSTYAISWVRQAPGQGLEWMGGII | 73 |
| and 2 | PIFGKAHYAQKFQGRVTITADESTSTAYMELSSLRSEDTAVYFCARKFHFVS | |
| | GSPFGMDVWGQGTTVTVSSASTKGPSVFPLAPCSRSTSESTAALGCLVKDYF | |
| | PEPVTVSWNSGALTSGVHTFPAVLQSSGLYSLSSVVTVPSSSLGTKTYTCNV | |
| | DHKPSNTKVDKRV [symbol] RNLPVATPDPGMFPCLHHSQNLLRAVSNMLQKAR | |
| | QTLEFYPCTSEEIDHEDITKDKTSTVEACLPLELTKNESSLNSRETSFITNG | |
| | SCLASRKTSFMMALCLSSIYEDLKMYQVEFKTMNAKLLMDPKRQIFLDQNML | |
| | AVIDELMQALNFNSETVPQKSSLEEPDFYKTKIKLCILLHAFRIRAVTIDRV | |
| | MSYLNAS [symbol] IWELKKDVYVVELDWYPDAPGEMV | |
| | VLTCDTPEEDGITWTLDQSSEVLGSGKTLTIQVKEFGDAGQYTCHKGGEVLS | |
| | HSLLLLHKKEDGIWSTDILKDQKEPKNKTFLRCEAKNYSGRFTCWWLTTIST | |
| | DLTFSVKSSRGSSDPQGVTCGAATLSAERVRGDNKEYEYSVECQEDSAAPAA | |
| | EESLPIEVMVDAVHKLKYENYTSSFFIRDIIKPDPPKNLQLKPLKNSRQVEV | |
| | SWEYPDTWSTPHSYFSLTFCVQVQGQDQDEKKDRVFTDKTSATVICRKNASI | |
| | SVRAQDRYYSSSWSEWASVPCS | |
| Chains 3 | EIVLTQSPATLSLSPGERATLSCRASQSVSSYLAWYQQKPGQAPRLLIYDAS | 74 |
| and 4 | NRATGIPARFSGSGSGTDFTLTISSLEPEDFAVYYCQQRSNWPTFGQGTKVE | |
| | IKRTVAAPSVFIFPPSDEQLKSGTASVVCLLNNFYPREAKVQWKVDNALQSG | |
| | NSQESVTEQDSKDSTYSLSSTLTLSKADYEKHKVYACEVTHQGLSSPVTKSF | |
| | NRGEC | |

P31011563

| | | |
|---|---|---|
| Chains 1 | EVQLLESGGGLVQPGGSLRLSCAASGFTFSSYAMSWVRQAPGKGLEWVSAII | 75 |
| and 2 | GSGASTYYADSVKGRFTISRDNSKNTLYLQMNSLRAEDTAVYYCAKGWFGGF | |
| | NYWGQGTLVTVSSASTKGPSVFPLAPSSKSTSGGTAALGCLVKDYFPEPVTV | |
| | SWNSGALTSGVHTFPAVLQSSGLYSLSSVVTVPSSSLGTQTYICNVNHKPSN | |
| | TKVDKKVEPKSCDKTHTCPPCPAPEAAGGPSVELFPPKPKDTLMISRTPEVT | |
| | CVVVDVSHEDPEVKFNWYVDGVEVHNAKTKPREEQYNSTYRVVSVLTVLHQD | |
| | WLNGKEYKCKVSNKALAAPIEKTISKAKGQPREPQVYTLPPSRDELTKNQVS | |
| | LTCLVKGFYPSDIAVEWESNGQPENNYKTTPPVLDSDGSFFLYSKLTVDKSR | |
| | WQQGNVFSCSVMHEALHNHYTQKSLSLSPG [symbol] RNLPVATPDPGMFPCLH | |
| | HSQNLLRAVSNMLQKARQTLEFYPCTSEEIDHEDITKDKTSTVEACLPLELT | |
| | KNESSLNSRETSFITNGSCLASRKTSEMMALCLSSIYEDLKMYQVEFKTMNA | |
| | KLLMDPKRQIFLDQNMLAVIDELMQALNFNSETVPQKSSLEEPDFYKTKIKL | |
| | CILLHAFRIRAVTIDRVMSYLNAS [symbol] IWELKKD | |
| | VYVVELDWYPDAPGEMVVLTCDTPEEDGITWTLDQSSEVLGSGKTLTIQVKE | |
| | FGDAGQYTCHKGGEVLSHSLLLLHKKEDGIWSTDILKDQKEPKNKTFLRCEA | |
| | KNYSGRFTCWWLTTISTDLTFSVKSSRGSSDPQGVTCGAATLSAERVRGDNK | |
| | EYEYSVECQEDSAAPAAEESLPIEVMVDAVHKLKYENYTSSFFIRDIIKPDP | |
| | PKNLQLKPLKNSRQVEVSWEYPDTWSTPHSYFSLTFCVQVQGQDQDEKKDRV | |
| | FTDKTSATVICRKNASISVRAQDRYYSSSWSEWASVPCS | |
| Chains 3 | EIVLTQSPGTLSLSPGERATLSCRASQSVTSSYLAWYQQKPGQAPRLLINVG | 76 |
| and 4 | SRRATGIPDRFSGSGSGTDFTLTISRLEPEDFAVYYCQQGIMLPPTFGQGTK | |
| | VEIKRTVAAPSVFIFPPSDEQLKSGTASVVCLLNNFYPREAKVQWKVDNALQ | |
| | SGNSQESVTEQDSKDSTYSLSSTLTLSKADYEKHKVYACEVTHQGLSSPVTK | |
| | SFNRGEC | |

P31021563

| | | |
|---|---|---|
| Chains 1 | EVQLLESGGGLVQPGGSLRLSCAASGFTFSSYAMSWVRQAPGKGLEWVSAII | 77 |
| and 2 | GSGASTYYADSVKGRFTISRDNSKNTLYLQMNSLRAEDTAVYYCAKGWFGGF | |
| | NYWGQGTLVTVSSASTKGPSVFPLAPSSKSTSGGTAALGCLVKDYFPEPVTV | |
| | SWNSGALTSGVHTFPAVLQSSGLYSLSSVVTVPSSSLGTQTYICNVNHKPSN | |
| | TKVDKKVEPKSCDK [symbol] RNLPVATPDPGMFPCLHHSQNLLRAVSNMLQKA | |
| | RQTLEFYPCTSEEIDHEDITKDKTSTVEACLPLELTKNESSLNSRETSFITN | |
| | GSCLASRKTSFMMALCLSSIYEDLKMYQVEFKTMNAKLLMDPKRQIFLDQNM | |
| | LAVIDELMQALNFNSETVPQKSSLEEPDFYKTKIKLCILLHAFRIRAVTIDR | |
| | VMSYLNAS [symbol] IWELKKDVYVVELDWYPDAPGEM | |
| | VVLTCDTPEEDGITWTLDQSSEVLGSGKTLTIQVKEFGDAGQYTCHKGGEVL | |
| | SHSLLLLHKKEDGIWSTDILKDQKEPKNKTFLRCEAKNYSGRFTCWWLTTIS | |
| | TDLTFSVKSSRGSSDPQGVTCGAATLSAERVRGDNKEYEYSVECQEDSAAPA | |
| | AEESLPIEVMVDAVHKLKYENYTSSFFIRDIIKPDPPKNLQLKPLKNSRQVE | |
| | VSWEYPDTWSTPHSYFSLTFCVQVQGQDQDEKKDRVFTDKTSATVICRKNAS | |
| | ISVRAQDRYYSSSWSEWASVPCS | |
| Chains 3 | EIVLTQSPGTLSLSPGERATLSCRASQSVTSSYLAWYQQKPGQAPRLLINVG | 78 |
| and 4 | SRRATGIPDRFSGSGSGTDFTLTISRLEPEDFAVYYCQQGIMLPPTFGQGTK | |
| | VEIKRTVAAPSVFIFPPSDEQLKSGTASVVCLLNNFYPREAKVQWKVDNALQ | |
| | SGNSQESVTEQDSKDSTYSLSSTLTLSKADYEKHKVYACEVTHQGLSSPVTK | |
| | SFNRGEC | |

P3189

| | | |
|---|---|---|
| Chains 1 | RNLPVATPDPGMFPCLHHSQNLLRAVSNMLQKARQTLEFYPCTSEEIDHEDI | 79 |
| and 2 | TKDKTSTVEACLPLELTKNESSLNSRETSFITNGSCLASRKTSFMMALCLSS | |
| | IYEDLKMYQVEFKTMNAKLLMDPKRQIFLDQNMLAVIDELMQALNFNSETVP | |
| | QKSSLEEPDFYKTKIKLCILLHAFRIRAVTIDRVMSYLNA [symbol] | |
| | [symbol] IWELKKDVYVVELDWYPDAPGEMVVLTCDTPEEDGITW | |
| | TLDQSSEVLGSGKTLTIQVKEFGDAGQYTCHKGGEVLSHSLLLLHKKEDGIW | |
| | STDILKDQKEPKNKTFLRCEAKNYSGRFTCWWLTTISTDLTFSVKSSRGSSD | |
| | PQGVTCGAATLSAERVRGDNKEYEYSVECQEDSAAPAAEESLPIEVMVDAVH | |
| | KLKYENYTSSFFIRDIIKPDPPKNLQLKPLKNSRQVEVSWEYPDTWSTPHSY | |
| | FSLTFCVQVQGQDQDEKKDRVFTDKTSATVICRKNASISVRAQDRYYSSSWS | |
| | EWASVPCS | |

P3190

| | | |
|---|---|---|
| Chains 1 | RNLPVATPDPGMFPCLHHSQNLLRAVSNMLQKARQTLEFYPCTSEEIDHEDI | 80 |
| and 2 | TKDKTSTVEACLPLELTKNESSLNSRETSFITNGSCLASRKTSFMMALCLSS | |
| | IYEDLKMYQVEFKTMNAKLLMDPKRQIFLDQNMLAVIDELMQALNFNSETVP | |
| | QKSSLEEPDFYKTKIKLCILLHAFRIRAVTIDRVMSYLNA [symbol] | |
| | [symbol] IWELKKDVYVVELDWYPDAPGEMVVLTCDTPEEDGITW | |
| | TLDQSSEVLGSGKTLTIQVKEFGDAGQYTCHKGGEVLSHSLLLLHKKEDGIW | |
| | STDILKDQKEPKNKTFLRCEAKNYSGRFTCWWLTTISTDLTFSVKSSRGSSD | |
| | PQGVTCGAATLSAERVRGDNKEYEYSVECQEDSAAPAAEESLPIEVMVDAVH | |
| | KLKYENYTSSFFIRDIIKPDPPKNLQLKPLKNSRQVEVSWEYPDTWSTPHSY | |
| | FSLTFSVQVQGQDQDEKKDRVFTDKTSATVICRKNASISVRAQDRYYSSSWS | |
| | EWASVPCS | |

P3191

| | | |
|---|---|---|
| Chains 1 | RNLPVATPDPGMFPCLHHSQNLLRAVSNMLQKARQTLEFYPCTSEEIDHEDI | 81 |
| and 2 | TKDKTSTVEACLPLELTKNESSLNSRETSFITNGSCLASRKTSFMMALCLSS | |
| | IYEDLKMYQVEFKTMNAKLLMDPKRQIFLDQNMLAVIDELMQALNFNSETVP | |
| | QKSSLEEPDFYKTKIKLCILLHAFRIRAVTIDRVMSYLNA [symbol] | |
| | [symbol] IWELKKDVYVVELDWYPDAPGEMVVLTCDTPEEDGITW | |
| | TLDQSSEVLGSGKTLTIQVKEFGDAGQYTCHKGGEVLSHSLLLLHKKEDGIW | |
| | STDILKDQKEPKNKTFLRCEAKNYSGRFTCWWLTTISTDLTFSVKSSRGSSD | |
| | PQGVTCGAATLSAERVRGDNKEYEYSVECQEDSAAPAAEESLPIEVMVDAVH | |
| | KLKYENYTSSFFIRDIIKPDPPKNLQLKPLKNSRQVEVSWEYPDTWSTPHSY | |
| | FSLTFCVQVQGKSKREKKDRVFTDKTSATVICRKNASISVRAQDRYYSSSWS | |
| | EWASVPCS | |

P3192

| | | |
|---|---|---|
| Chains 1 | RNLPVATPDPGMFPCLHHSQNLLRAVSNMLQKARQTLEFYPCTSEEIDHEDI | 82 |
| and 2 | TKDKTSTVEACLPLELTKNESSLNSRETSFITNGSCLASRKTSFMMALCLSS | |
| | IYEDLKMYQVEFKTMNAKLLMDPKRQIFLDQNMLAVIDELMQALNFNSETVP | |
| | QKSSLEEPDFYKTKIKLCILLHAFRIRAVTIDRVMSYLNA [symbol] | |
| | [symbol] IWELKKDVYVVELDWYPDAPGEMVVLTCDTPEEDGITW | |
| | TLDQSSEVLGSGKTLTIQVKEFGDAGQYTCHKGGEVLSHSLLLLHKKEDGIW | |
| | STDILKDQKEPKNKTFLRCEAKNYSGRFTCWWLTTISTDLTFSVKSSRGSSD | |
| | PQGVTCGAATLSAERVRGDNKEYEYSVECQEDSAAPAAEESLPIEVMVDAVH | |
| | KLKYENYTSSFFIRDIIKPDPPKNLQLKPLKNSRQVEVSWEYPDTWSTPHSY | |
| | FSLTFSVQVQGKSKREKKDRVFTDKTSATVICRKNASISVRAQDRYYSSSWS | |
| | EWASVPCS | |

P3193

| | | |
|---|---|---|
| Chains 1 | RNLPVATPDPGMFPCLHHSQNLLRAVSNMLQKARQTLEFYPCTSEEIDHEDI | 83 |
| and 2 | TKDKTSTVEACLPLELTKNESCLNSRETSFITNGSCLASRKTSFMMALCLSS | |
| | IYEDLKMYQVEFKTMNAKLLMDPKRQIFLDQNMLAVIDELMQALNFNSETVP | |
| | QKSSLEEPDFYKTKIKLCILLHAFRIRAVTIDRVMSYLNA [symbol] | |
| | [symbol] IWELKKDVYVVELDWYPDAPGEMVVLTCDTPEEDGITW | |
| | TLDQSSEVLGSGKTLTIQVKEFGDAGQYTCHKGGEVLSHSLLLLHKKEDGIW | |
| | STDILKDQKEPKNKTFLRCEAKNYSGRFTCWWLTTISTDLTFSVKSSRGSSD | |
| | PQGVTCGAATLSAERVRGDNKEYEYSVECQEDSACPAAEESLPIEVMVDAVH | |
| | KLKYENYTSSFFIRDIIKPDPPKNLQLKPLKNSRQVEVSWEYPDTWSTPHSY | |
| | FSLTFCVQVQGQDQDEKKDRVFTDKTSATVICRKNASISVRAQDRYYSSSWS | |
| | EWASVPCS | |

P3194

| | | |
|---|---|---|
| Chains 1 | RNLPVATPDPGMFPCLHHSQNLLRAVSNMLQKARQTLEFYPCTSEEIDHEDI | 84 |
| and 2 | TKDKTSTVEACLPLELTKNESCLNSRETSFITNGSCLASRKTSFMMALCLSS | |
| | IYEDLKMYQVEFKTMNAKLLMDPKRQIFLDQNMLAVIDELMQALNFNSETVP | |
| | QKSSLEEPDFYKTKIKLCILLHAFRIRAVTIDRVMSYLNA [symbol] | |
| | [symbol] IWELKKDVYVVELDWYPDAPGEMVVLTCDTPEEDGITW | |
| | TLDQSSEVLGSGKTLTIQVKEFGDAGQYTCHKGGEVLSHSLLLLHKKEDGIW | |
| | STDILKDQKEPKNKTFLRCEAKNYSGRFTCWWLTTISTDLTFSVKSSRGSSD | |
| | PQGVTCGAATLSAERVRGDNKEYEYSVECQEDSACPAAEESLPIEVMVDAVH | |
| | KLKYENYTSSFFIRDIIKPDPPKNLQLKPLKNSRQVEVSWEYPDTWSTPHSY | |
| | FSLTFSVQVQGQDQDEKKDRVFTDKTSATVICRKNASISVRAQDRYYSSSWS | |
| | EWASVPCS | |

P3195

| | | |
|---|---|---|
| Chains 1 | RNLPVATPDPGMFPCLHHSQNLLRAVSNMLQKARQTLEFYPCTSEEIDHEDI | 85 |
| and 2 | TKDKTSTVEACLPLELTKNESCLNSRETSFITNGSCLASRKTSFMMALCLSS | |
| | IYEDLKMYQVEFKTMNAKLLMDPKRQIFLDQNMLAVIDELMQALNFNSETVP | |
| | QKSSLEEPDFYKTKIKLCILLHAFRIRAVTIDRVMSYLNA [symbol] | |
| | [symbol] IWELKKDVYVVELDWYPDAPGEMVVLTCDTPEEDGITW | |
| | TLDQSSEVLGSGKTLTIQVKEFGDAGQYTCHKGGEVLSHSLLLLHKKEDGIW | |
| | STDILKDQKEPKNKTFLRCEAKNYSGRFTCWWLTTISTDLTFSVKSSRGSSD | |
| | PQGVTCGAATLSAERVRGDNKEYEYSVECQEDSACPAAEESLPIEVMVDAVH | |
| | KLKYENYTSSFFIRDIIKPDPPKNLQLKPLKNSRQVEVSWEYPDTWSTPHSY | |
| | FSLTFCVQVQGKSKREKKDRVFTDKTSATVICRKNASISVRAQDRYYSSSWS | |
| | EWASVPCS | |

P3196

| | | |
|---|---|---|
| Chains 1 | RNLPVATPDPGMFPCLHHSQNLLRAVSNMLQKARQTLEFYPCTSEEIDHEDI | 86 |
| and 2 | TKDKTSTVEACLPLELTKNESCLNSRETSFITNGSCLASRKTSFMMALCLSS | |
| | IYEDLKMYQVEFKTMNAKLLMDPKRQIFLDQNMLAVIDELMQALNFNSETVP | |
| | QKSSLEEPDFYKTKIKLCILLHAFRIRAVTIDRVMSYLNA [symbol] | |
| | [symbol] IWELKKDVYVVELDWYPDAPGEMVVLTCDTPEEDGITW | |
| | TLDQSSEVLGSGKTLTIQVKEFGDAGQYTCHKGGEVLSHSLLLLHKKEDGIW | |
| | STDILKDQKEPKNKTFLRCEAKNYSGRFTCWWLTTISTDLTFSVKSSRGSSD | |
| | PQGVTCGAATLSAERVRGDNKEYEYSVECQEDSACPAAEESLPIEVMVDAVH | |
| | KLKYENYTSSFFIRDIIKPDPPKNLQLKPLKNSRQVEVSWEYPDTWSTPHSY | |
| | FSLTFSVQVQGKSKREKKDRVFTDKTSATVICRKNASISVRAQDRYYSSSWS | |
| | EWASVPCS | |

P32692158

| | | |
|---|---|---|
| Chains 1 | QVQLVQSGAEVKKPGASVKVSCKASGYTFTMNIIHWVRQAPGQGLEWMGWIH | 87 |
| and 2 | PGSGAIKYAQKLQGRVTMTTDTSTSTAYMELRSLRSDDTAVYYCARHGGTGR | |
| | GAMDYWGQGTLVTVSSASTKGPSVFPLAPSSKSTSGGTAALGCLVKDYFPEP | |
| | VTVSWNSGALTSGVHTFPAVLQSSGLYSLSSVVTVPSSSLGTQTYICNVNHK | |
| | PSNTKVDKKVEPKSCDKTHTCPPCPAPEAAGGPSVFLFPPKPKDTLMISRTP | |
| | EVTCVVVDVSHEDPEVKFNWYVDGVEVHNAKTKPREEQYNSTYRVVSVLTVL | |
| | HQDWLNGKEYKCKVSNKALAAPIEKTISKAKGQPREPQVYTLPPSRDELTKN | |
| | QVSLTCLVKGFYPSDIAVEWESNGQPENNYKTTPPVLDSDGSFFLYSKLTVD | |
| | KSRWQQGNVFSCSVMHEALHNHYTQKSLSLSPG [symbol] RNLPVATPDPGMFP | |
| | CLHHSQNLLRAVSNMLQKARQTLEFYPCTSEEIDHEDITKDKTSTVEACLPL | |
| | ELTKNESSLNSRETSFITNGSCLASRKTSFMMALCLSSIYEDLKMYQVEFKT | |
| | MNAKLLMDPKRQIFLDQNMLAVIDELMQALNFNSETVPQKSSLEEPDFYKTK | |
| | IKLCILLHAFRIRAVTIDRVMSYLNAS [symbol] | |
| | IWELKKDVYVVELDWYPDAPGEMVVLTCDTPEEDGITWTLDQSSEVLGSGKT | |
| | LTIQVKEFGDAGQYTCHKGGEVLSHSLLLLHKKEDGIWSTDILKDQKEPKNK | |
| | TFLRCEAKNYSGRFTCWWLTTISTDLTFSVKSSRGSSDPQGVTCGAATLSAE | |
| | RVRGDNKEYEYSVECQEDSAAPAAEESLPIEVMVDAVHKLKYENYTSSFFIR | |
| | DIIKPDPPKNLQLKPLKNSRQVEVSWEYPDTWSTPHSYFSLTFSVQVQGQDQ | |
| | DEKKDRVFTDKTSATVICRKNASISVRAQDRYYSSSWSEWASVPCS | |
| Chains 3 | EIVLTQSPGTLSLSPGERATLSCRASQSVSTSAYSYMHWYQQKPGQAPRLLI | 88 |
| and 4 | YLASNLESGIPDRFSGSGSGTDFTLTISRLEPEDFAVYYCQQSRELPYTFGQ | |
| | GTKLEIKRTVAAPSVFIFPPSDEQLKSGTASVVCLLNNFYPREAKVQWKVDN | |
| | ALQSGNSQESVTEQDSKDSTYSLSSTLTLSKADYEKHKVYACEVTHQGLSSP | |
| | VTKSFNRGEC | |

P32702158

| | | |
|---|---|---|
| Chains 1 | QVQLVQSGAEVKKPGASVKVSCKASGYTFTMNIIHWVRQAPGQGLEWMGWIH | 89 |
| and 2 | PGSGAIKYAQKLQGRVTMTTDTSTSTAYMELRSLRSDDTAVYYCARHGGTGR | |
| | GAMDYWGQGTLVTVSSASTKGPSVFPLAPSSKSTSGGTAALGCLVKDYFPEP | |
| | VTVSWNSGALTSGVHTFPAVLQSSGLYSLSSVVTVPSSSLGTQTYICNVNHK | |
| | PSNTKVDKKVEPKSCDK [symbol] RNLPVATPDPGMFPCLHHSQNLLRAVSNML | |
| | QKARQTLEFYPCTSEEIDHEDITKDKTSTVEACLPLELTKNESSLNSRETSF | |
| | ITNGSCLASRKTSFMMALCLSSIYEDLKMYQVEFKTMNAKLLMDPKRQIFLD | |
| | QNMLAVIDELMQALNFNSETVPQKSSLEEPDFYKTKIKLCILLHAFRIRAVT | |
| | IDRVMSYLNAA [symbol] IWELKKDVYVVELDWY | |
| | PDAPGEMVVLTCDTPEEDGITWTLDQSSEVLGSGKTLTIQVKEFGDAGQYTC | |
| | HKGGEVLSHSLLLLHKKEDGIWSTDILKDQKEPKNKTFLRCEAKNYSGRFTC | |
| | WWLTTISTDLTFSVKSSRGSSDPQGVTCGAATLSAERVRGDNKEYEYSVECQ | |
| | EDSAAPAAEESLPIEVMVDAVHKLKYENYTSSFFIRDIIKPDPPKNLQLKPL | |
| | KNSRQVEVSWEYPDTWSTPHSYFSLTFSVQVQGQDQDEKKDRVFTDKTSATV | |
| | ICRKNASISVRAQDRYYSSSWSEWASVPCS | |
| Chains 3 | EIVLTQSPGTLSLSPGERATLSCRASQSVSTSAYSYMHWYQQKPGQAPRLLI | 90 |
| and 4 | YLASNLESGIPDRFSGSGSGTDFTLTISRLEPEDFAVYYCQQSRELPYTFGQ | |
| | GTKLEIKRTVAAPSVFIFPPSDEQLKSGTASVVCLLNNFYPREAKVQWKVDN | |
| | ALQSGNSQESVTEQDSKDSTYSLSSTLTLSKADYEKHKVYACEVTHQGLSSP | |
| | VTKSFNRGEC | |

P32712158

| | | |
|---|---|---|
| Chains 1 | QVQLVQSGAEVKKPGASVKVSCKASGYTFTMNIIHWVRQAPGQGLEWMGWIH | 91 |
| and 2 | PGSGAIKYAQKLQGRVTMTTDTSTSTAYMELRSLRSDDTAVYYCARHGGTGR | |
| | GAMDYWGQGTLVTVSSASTKGPSVFPLAPSSKSTSGGTAALGCLVKDYFPEP | |
| | VTVSWNSGALTSGVHTFPAVLQSSGLYSLSSVVTVPSSSLGTQTYICNVNHK | |
| | PSNTKVDKKVEPKSCDK [symbol] RNLPVATPDPGMFPCLHHSQNLLRAVSNML | |
| | QKARQTLEFYPCTSEEIDHEDITKDKTSTVEACLPLELTKNESSLNSRETSF | |
| | ITNGSCLASRKTSFMMALCLSSIYEDLKMYQVEFKTMNAKLLMDPKRQIFLD | |
| | QNMLAVIDELMQALNFNSETVPQKSSLEEPDFYKTKIKLCILLHAFRIRAVT | |
| | IDRVMSYLNAA [symbol] IWELKKDVYVVELDWY | |
| | PDAPGEMVVLTCDTPEEDGITWTLDQSSEVLGSGKTLTIQVKEFGDAGQYTC | |
| | HKGGEVLSHSLLLLHKKEDGIWSTDILKDQKEPKNKTFLRCEAKNYSGRFTC | |
| | WWLTTISTDLTFSVKSSRGSSDPQGVTCGAATLSAERVRGDNKEYEYSVECQ | |
| | EDSAAPAAEESLPIEVMVDAVHKLKYENYTSSFFIRDIIKPDPPKNLQLKPL | |
| | KNSRQVEVSWEYPDTWSTPHSYFSLTFSVQVQGQDQDEKKDRVFTDKTSATV | |
| | ICRKNASISVRAQDRYYSSSWSEWASVPCS | |
| Chains 3 | EIVLTQSPGTLSLSPGERATLSCRASQSVSTSAYSYMHWYQQKPGQAPRLLI | 92 |
| and 4 | YLASNLESGIPDRFSGSGSGTDFTLTISRLEPEDFAVYYCQQSRELPYTEGQ | |
| | GTKLEIKRTVAAPSVFIFPPSDEQLKSGTASVVCLLNNFYPREAKVQWKVDN | |
| | ALQSGNSQESVTEQDSKDSTYSLSSTLTLSKADYEKHKVYACEVTHQGLSSP | |
| | VTKSFNRGEC | |

P32721942

| | | |
|---|---|---|
| Chains 1 | QVQLVQSGAEVKKPGSSVKVSCKTSGDTFSTYAISWVRQAPGQGLEWMGGII | 93 |
| and 2 | PIFGKAHYAQKFQGRVTITADESTSTAYMELSSLRSEDTAVYFCARKFHFVS | |
| | GSPFGMDVWGQGTTVTVSSASTKGPSVFPLAPCSRSTSESTAALGCLVKDYF | |
| | PEPVTVSWNSGALTSGVHTFPAVLQSSGLYSLSSVVTVPSSSLGTKTYTCNV | |
| | DHKPSNTKVDKRVESKYGPPCPPCPAPEFLGGPSVFLFPPKPKDTLMISRTP | |
| | EVTCVVVDVSQEDPEVQFNWYVDGVEVHNAKTKPREEQFNSTYRVVSVLTVL | |
| | HQDWLNGKEYKCKVSNKGLPSSIEKTISKAKGQPREPQVYTLPPSQEEMTKN | |
| | QVSLTCLVKGFYPSDIAVEWESNGQPENNYKTTPPVLDSDGSFFLYSRLTVD | |
| | KSRWQEGNVFSCSVMHEALHNHYTQKSLSLSLG [symbol] RNLPVATPDPGMFP | |
| | CLHHSQNLLRAVSNMLQKARQTLEFYPCTSEEIDHEDITKDKTSTVEACLPL | |
| | ELTKNESSLNSRETSFITNGSCLASRKTSFMMALCLSSIYEDLKMYQVEFKT | |
| | MNAKLLMDPKRQIFLDQNMLAVIDELMQALNFNSETVPQKSSLEEPDFYKTK | |
| | IKLCILLHAFRIRAVTIDRVMSYLNAA [symbol] | |
| | IWELKKDVYVVELDWYPDAPGEMVVLTCDTPEEDGITWTLDQSSEVLGSGKT | |
| | LTIQVKEFGDAGQYTCHKGGEVLSHSLLLLHKKEDGIWSTDILKDQKEPKNK | |
| | TFLRCEAKNYSGRFTCWWLTTISTDLTFSVKSSRGSSDPQGVTCGAATLSAE | |
| | RVRGDNKEYEYSVECQEDSAAPAAEESLPIEVMVDAVHKLKYENYTSSFFIR | |
| | DIIKPDPPKNLQLKPLKNSRQVEVSWEYPDTWSTPHSYFSLTFSVQVQGQDQ | |
| | DEKKDRVFTDKTSATVICRKNASISVRAQDRYYSSSWSEWASVPCS | |
| Chains 3 | EIVLTQSPATLSLSPGERATLSCRASQSVSSYLAWYQQKPGQAPRLLIYDAS | 94 |
| and 4 | NRATGIPARFSGSGSGTDFTLTISSLEPEDFAVYYCQQRSNWPTFGQGTKVE | |
| | IKRTVAAPSVFIFPPSDEQLKSGTASVVCLLNNFYPREAKVQWKVDNALQSG | |
| | NSQESVTEQDSKDSTYSLSSTLTLSKADYEKHKVYACEVTHQGLSSPVTKSF | |
| | NRGEC | |

P32731942

| | | |
|---|---|---|
| Chains 1 | QVQLVQSGAEVKKPGSSVKVSCKTSGDTFSTYAISWVRQAPGQGLEWMGGII | 95 |
| and 2 | PIFGKAHYAQKFQGRVTITADESTSTAYMELSSLRSEDTAVYFCARKFHFVS | |
| | GSPFGMDVWGQGTTVTVSSASTKGPSVFPLAPCSRSTSESTAALGCLVKDYF | |
| | PEPVTVSWNSGALTSGVHTFPAVLQSSGLYSLSSVVTVPSSSLGTKTYTCNV | |
| | DHKPSNTKVDKRV [symbol] RNLPVATPDPGMFPCLHHSQNLLRAVSNMLQKAR | |
| | QTLEFYPCTSEEIDHEDITKDKTSTVEACLPLELTKNESSLNSRETSFITNG | |
| | SCLASRKTSFMMALCLSSIYEDLKMYQVEFKTMNAKLLMDPKRQIFLDQNML | |
| | AVIDELMQALNFNSETVPQKSSLEEPDFYKTKIKLCILLHAFRIRAVTIDRV | |
| | MSYLNAA [symbol] IWELKKDVYVVELDWYPDAP | |
| | GEMVVLTCDTPEEDGITWTLDQSSEVLGSGKTLTIQVKEFGDAGQYTCHKGG | |
| | EVLSHSLLLLHKKEDGIWSTDILKDQKEPKNKTFLRCEAKNYSGRFTCWWLT | |
| | TISTDLTFSVKSSRGSSDPQGVTCGAATLSAERVRGDNKEYEYSVECQEDSA | |
| | APAAEESLPIEVMVDAVHKLKYENYTSSFFIRDIIKPDPPKNLQLKPLKNSR | |
| | QVEVSWEYPDTWSTPHSYFSLTFSVQVQGQDQDEKKDRVFTDKTSATVICRK | |
| | NASISVRAQDRYYSSSWSEWASVPCS | |
| Chains 3 | EIVLTQSPATLSLSPGERATLSCRASQSVSSYLAWYQQKPGQAPRLLIYDAS | 96 |
| and 4 | NRATGIPARFSGSGSGTDFTLTISSLEPEDFAVYYCQQRSNWPTFGQGTKVE | |
| | IKRTVAAPSVFIFPPSDEQLKSGTASVVCLLNNFYPREAKVQWKVDNALQSG | |
| | NSQESVTEQDSKDSTYSLSSTLTLSKADYEKHKVYACEVTHQGLSSPVTKSF | |
| | NRGEC | |

P32741942

| | | |
|---|---|---|
| Chains 1 | QVQLVQSGAEVKKPGSSVKVSCKTSGDTFSTYAISWVRQAPGQGLEWMGGII | 97 |
| and 2 | PIFGKAHYAQKFQGRVTITADESTSTAYMELSSLRSEDTAVYFCARKFHFVS | |
| | GSPFGMDVWGQGTTVTVSSASTKGPSVFPLAPCSRSTSESTAALGCLVKDYF | |
| | PEPVTVSWNSGALTSGVHTFPAVLQSSGLYSLSSVVTVPSSSLGTKTYTCNV | |
| | DHKPSNTKVDKRV [symbol] RNLPVATPDPGMFPCLHHSQNLLRAVSNMLQKAR | |
| | QTLEFYPCTSEEIDHEDITKDKTSTVEACLPLELTKNESSLNSRETSFITNG | |
| | SCLASRKTSFMMALCLSSIYEDLKMYQVEFKTMNAKLLMDPKRQIFLDQNML | |
| | AVIDELMQALNFNSETVPQKSSLEEPDFYKTKIKLCILLHAFRIRAVTIDRV | |
| | MSYLNAA [symbol] IWELKKDVYVVELDWYPDAP | |
| | GEMVVLTCDTPEEDGITWTLDQSSEVLGSGKTLTIQVKEFGDAGQYTCHKGG | |
| | EVLSHSLLLLHKKEDGIWSTDILKDQKEPKNKTFLRCEAKNYSGRFTCWWLT | |
| | TISTDLTFSVKSSRGSSDPQGVTCGAATLSAERVRGDNKEYEYSVECQEDSA | |
| | APAAEESLPIEVMVDAVHKLKYENYTSSFFIRDIIKPDPPKNLQLKPLKNSR | |
| | QVEVSWEYPDTWSTPHSYFSLTFSVQVQGQDQDEKKDRVFTDKTSATVICRK | |
| | NASISVRAQDRYYSSSWSEWASVPCS | |
| Chains 3 | EIVLTQSPATLSLSPGERATLSCRASQSVSSYLAWYQQKPGQAPRLLIYDAS | 98 |
| and 4 | NRATGIPARFSGSGSGTDFTLTISSLEPEDFAVYYCQQRSNWPTFGQGTKVE | |
| | IKRTVAAPSVFIFPPSDEQLKSGTASVVCLLNNFYPREAKVQWKVDNALQSG | |
| | NSQESVTEQDSKDSTYSLSSTLTLSKADYEKHKVYACEVTHQGLSSPVTKSF | |
| | NRGEC | |

P32771942

| | | |
|---|---|---|
| Chains 1 | QVQLVQSGAEVKKPGSSVKVSCKTSGDTFSTYAISWVRQAPGQGLEWMGGII | 99 |
| and 2 | PIFGKAHYAQKFQGRVTITADESTSTAYMELSSLRSEDTAVYFCARKFHFVS | |
| | GSPFGMDVWGQGTTVTVSSASTKGPSVFPLAPCSRSTSESTAALGCLVKDYF | |
| | PEPVTVSWNSGALTSGVHTFPAVLQSSGLYSLSSVVTVPSSSLGTKTYTCNV | |
| | DHKPSNTKVDKRV [symbol] RNLPVATPDPGMFPCLHHSQNLLRAVSNMLQKAR | |
| | QTLEFYPCTSEEIDHEDITKDKTSTVEACLPLELTKNESSLNSRETSFITNG | |
| | SCLASRKTSFMMALCLSSIYEDLKMYQVEFKTMNAKLLMDPKRQIFLDQNML | |
| | AVIDELMQALNFNSETVPQKSSLEEPDFYKTKIKLCILLHAFRIRAVTIARV | |
| | MSYLNAA [symbol] IWELKKDVYVVELDWYPDAP | |
| | GEMVVLTCDTPEEDGITWTLDQSSEVLGSGKTLTIQVKEFGDAGQYTCHKGG | |
| | EVLSHSLLLLHKKEDGIWSTDILKDQKEPKNKTFLRCEAKNYSGRFTCWWLT | |
| | TISTDLTFSVKSSRGSSDPQGVTCGAATLSAERVRGDNKEYEYSVECQEDSA | |
| | APAAEESLPIEVMVDAVHKLKYENYTSSFFIRDIIKPDPPKNLQLKPLKNSR | |
| | QVEVSWEYPDTWSTPHSYFSLTFSVQVQGQDQDEKKDRVFTDKTSATVICRK | |
| | NASISVRAQDRYYSSSWSEWASVPCS | |
| Chains 3 | EIVLTQSPATLSLSPGERATLSCRASQSVSSYLAWYQQKPGQAPRLLIYDAS | 100 |
| and 4 | NRATGIPARFSGSGSGTDFTLTISSLEPEDFAVYYCQQRSNWPTFGQGTKVE | |
| | IKRTVAAPSVFIFPPSDEQLKSGTASVVCLLNNFYPREAKVQWKVDNALQSG | |
| | NSQESVTEQDSKDSTYSLSSTLTLSKADYEKHKVYACEVTHQGLSSPVTKSF | |
| | NRGEC | |

P32781942

| | | |
|---|---|---|
| Chains 1 | QVQLVQSGAEVKKPGSSVKVSCKTSGDTFSTYAISWVRQAPGQGLEWMGGII | 101 |
| and 2 | PIFGKAHYAQKFQGRVTITADESTSTAYMELSSLRSEDTAVYFCARKFHFVS | |
| | GSPFGMDVWGQGTTVTVSSASTKGPSVFPLAPCSRSTSESTAALGCLVKDYF | |
| | PEPVTVSWNSGALTSGVHTFPAVLQSSGLYSLSSVVTVPSSSLGTKTYTCNV | |
| | DHKPSNTKVDKRV [symbol] RNLPVATPDPGMFPCLHHSQNLLRAVSNMLQKAR | |
| | QTLEFYPCTSEEIDHEDITKDKTSTVEACLPLELTKNESSLNSRETSFITNG | |
| | SCLASRKTSFMMALCLSSIYEDLKMYQVEFKTMNAKLLMDPKRQIFLDQNML | |
| | AVIDELMQALNFNSETVPQKSSLEEPDFAKTKIKLCILLHAFRIRAVTIDRV | |
| | MSYLNAA [symbol] IWELKKDVYVVELDWYPDAP | |
| | GEMVVLTCDTPEEDGITWTLDQSSEVLGSGKTLTIQVKEFGDAGQYTCHKGG | |
| | EVLSHSLLLLHKKEDGIWSTDILKDQKEPKNKTFLRCEAKNYSGRFTCWWLT | |
| | TISTDLTFSVKSSRGSSDPQGVTCGAATLSAERVRGDNKEYEYSVECQEDSA | |
| | APAAEESLPIEVMVDAVHKLKYENYTSSFFIRDIIKPDPPKNLQLKPLKNSR | |
| | QVEVSWEYPDTWSTPHSYFSLTFSVQVQGQDQDEKKDRVFTDKTSATVICRK | |
| | NASISVRAQDRYYSSSWSEWASVPCS | |
| Chains 3 | EIVLTQSPATLSLSPGERATLSCRASQSVSSYLAWYQQKPGQAPRLLIYDAS | 102 |
| and 4 | NRATGIPARFSGSGSGTDFTLTISSLEPEDFAVYYCQQRSNWPTFGQGTKVE | |
| | IKRTVAAPSVFIFPPSDEQLKSGTASVVCLLNNFYPREAKVQWKVDNALQSG | |
| | NSQESVTEQDSKDSTYSLSSTLTLSKADYEKHKVYACEVTHQGLSSPVTKSF | |
| | NRGEC | |

P32791942

| | | |
|---|---|---|
| Chains 1 | QVQLVQSGAEVKKPGSSVKVSCKTSGDTFSTYAISWVRQAPGQGLEWMGGII | 103 |
| and 2 | PIFGKAHYAQKFQGRVTITADESTSTAYMELSSLRSEDTAVYFCARKFHFVS | |
| | GSPFGMDVWGQGTTVTVSSASTKGPSVFPLAPCSRSTSESTAALGCLVKDYF | |
| | PEPVTVSWNSGALTSGVHTFPAVLQSSGLYSLSSVVTVPSSSLGTKTYTCNV | |
| | DHKPSNTKVDKRV [symbol] RNLPVATPDPGMFPCLHHSQNLLRAVSNMLQKAR | |
| | QTLEFYPCTSEEIDHEDITKDKTSTVEACLPLELTKNESSLNSRETSFITNG | |
| | SCLASRKTSFMMALCLSSIYEDLKMYQVEFKTMNAKLLMDPKRQIFLDQNML | |
| | AVIDELMQALNFNSETVPQKSSLEEPDFDKTKIKLCILLHAFRIRAVTIDRV | |
| | MSYLNAA [symbol] IWELKKDVYVVELDWYPDAP | |
| | GEMVVLTCDTPEEDGITWTLDQSSEVLGSGKTLTIQVKEFGDAGQYTCHKGG | |
| | EVLSHSLLLLHKKEDGIWSTDILKDQKEPKNKTFLRCEAKNYSGRFTCWWLT | |
| | TISTDLTFSVKSSRGSSDPQGVTCGAATLSAERVRGDNKEYEYSVECQEDSA | |
| | APAAEESLPIEVMVDAVHKLKYENYTSSFFIRDIIKPDPPKNLQLKPLKNSR | |
| | QVEVSWEYPDTWSTPHSYFSLTFSVQVQGQDQDEKKDRVFTDKTSATVICRK | |
| | NASISVRAQDRYYSSSWSEWASVPCS | |
| Chains 3 | EIVLTQSPATLSLSPGERATLSCRASQSVSSYLAWYQQKPGQAPRLLIYDAS | 104 |
| and 4 | NRATGIPARFSGSGSGTDFTLTISSLEPEDFAVYYCQQRSNWPTFGQGTKVE | |
| | IKRTVAAPSVFIFPPSDEQLKSGTASVVCLLNNFYPREAKVQWKVDNALQSG | |
| | NSQESVTEQDSKDSTYSLSSTLTLSKADYEKHKVYACEVTHQGLSSPVTKSF | |
| | NRGEC | |

[0189] Thus, in certain embodiments, the first and second polypeptides (that is, chains 1 and 2) of an attenuated protein homodimer comprise, consist, or consist essentially of an amino acid sequence that is at least 80, 85, 90, 95, 98, or 100% identical to a sequence selected from Table S3. In certain embodiments, the attenuated proprotein homodimer comprises chains 3 and 4 selected from Table S3, for example, wherein the VL/CL region is a separate polypeptide chain that is bound to the VH/CH1 region via the disulfide bond, or wherein the VH/CH1 region is a separate polypeptide chain that is bound to the VL/CL region via the disulfide bond.

[0190] Exemplary attenuated protein heterodimers are provided in Table S4.

TABLE S4
Exemplary Attenuated Fusion Proteins

| | | |
|---|---|---|
| | | SEQ ID |
| Name | Sequence | NO: |

P32213218

| | | |
|---|---|---|
| Chain 1 | EVQLVESGGGLVQPGGSLRLSCAASGFTFSDSWIHWVRQAPGKGLEWVAWIS | 105 |
| | PYGGSTYYADSVKGRFTISADTSKNTAYLQMNSLRAEDTAVYYCARRHWPGG | |
| | FDYWGQGTLVTVSSASTKGPSVFPLAPSSKSTSGGTAALGCLVKDYFPEPVT | |
| | VSWNSGALTSGVHTFPAVLQSSGLYSLSSVVTVPSSSLGTQTYICNVNHKPS | |
| | NTKVDKKVEPKSCDK [symbol] IWELKKDVYVVELDWYPDAPGEMVVLTCDTPE | |
| | EDGITWTLDQSSEVLGSGKTLTIQVKEFGDAGQYTCHKGGEVLSHSLLLLHK | |
| | KEDGIWSTDILKDQKEPKNKTFLRCEAKNYSGRFTCWWLTTISTDLTFSVKS | |
| | SRGSSDPQGVTCGAATLSAERVRGDNKEYEYSVECQEDSACPAAEESLPIEV | |
| | MVDAVHKLKYENYTSSFFIRDIIKPDPPKNLQLKPLKNSRQVEVSWEYPDTW | |
| | STPHSYFSLTFSVQVQGKSKREKKDRVFTDKTSATVICRKNASISVRAQDRY | |
| | YSSSWSEWASVPCS | |
| Chain 2 | DIQMTQSPSSLSASVGDRVTITCRASQDVSTAVAWYQQKPGKAPKLLIYSAS | 106 |
| | FLYSGVPSRFSGSGSGTDFTLTISSLQPEDFATYYCQQYLYHPATFGQGTKV | |
| | EIKRTVAAPSVFIFPPSDEQLKSGTASVVCLLNNFYPREAKVQWKVDNALQS | |
| | GNSQESVTEQDSKDSTYSLSSTLTLSKADYEKHKVYACEVTHQGLSSPVTKS | |
| | FNRGEC [symbol] RNLPVATPDPGMFPCLHHSQNLLRAVSNMLQKARQTLEFYP | |
| | CTSEEIDHEDITKDKTSTVEACLPLELTKNESCLNSRETSFITNGSCLASRK | |
| | TSFMMALCLSSIYEDLKMYQVEFKTMNAKLLMDPKRQIFLDQNMLAVIDELM | |
| | QALNFNSETVPQKSSLEEPDFYKTKIKLCILLHAFRIRAVTIDRVMSYLNAS | |

P3230313218

| | | |
|---|---|---|
| Chain 1 | IWELKKDVYVVELDWYPDAPGEMVVLTCDTPEEDGITWTLDQSSEVLGSGKT | 107 |
| | LTIQVKEFGDAGQYTCHKGGEVLSHSLLLLHKKEDGIWSTDILKDQKEPKNK | |
| | TFLRCEAKNYSGRFTCWWLTTISTDLTFSVKSSRGSSDPQGVTCGAATLSAE | |
| | RVRGDNKEYEYSVECQEDSACPAAEESLPIEVMVDAVHKLKYENYTSSFFIR | |
| | DIIKPDPPKNLQLKPLKNSRQVEVSWEYPDTWSTPHSYFSLTFCVQVQGKSK | |
| | REKKDRVFTDKTSATVICRKNASISVRAQDRYYSSSWSEWASVPCS | |
| Chain 2 | EVQLVESGGGLVQPGGSLRLSCAASGFTFSDSWIHWVRQAPGKGLEWVAWIS | 108 |
| | PYGGSTYYADSVKGRFTISADTSKNTAYLQMNSLRAEDTAVYYCARRHWPGG | |
| | FDYWGQGTLVTVSSASTKGPSVFPLAPSSKSTSGGTAALGCLVKDYFPEPVT | |
| | VSWNSGALTSGVHTFPAVLQSSGLYSLSSVVTVPSSSLGTQTYICNVNHKPS | |
| | NTKVDKKVEPKSCDK | |
| Chain 3 | DIQMTQSPSSLSASVGDRVTITCRASQDVSTAVAWYQQKPGKAPKLLIYSAS | 109 |
| | FLYSGVPSRFSGSGSGTDFTLTISSLQPEDFATYYCQQYLYHPATFGQGTKV | |
| | EIKRTVAAPSVFIFPPSDEQLKSGTASVVCLLNNFYPREAKVQWKVDNALQS | |
| | GNSQESVTEQDSKDSTYSLSSTLTLSKADYEKHKVYACEVTHQGLSSPVTKS | |
| | FNRGEC [symbol] RNLPVATPDPGMFPCLHHSQNLLRAVSNMLQKARQTLEFYP | |
| | CTSEEIDHEDITKDKTSTVEACLPLELTKNESCLNSRETSFITNGSCLASRK | |
| | TSFMMALCLSSIYEDLKMYQVEFKTMNAKLLMDPKRQIFLDQNMLAVIDELM | |
| | QALNFNSETVPQKSSLEEPDFYKTKIKLCILLHAFRIRAVTIDRVMSYLNAS | |

P32223219

| | | |
|---|---|---|
| Chain 1 | EVQLVESGGGLVQPGGSLRLSCAASGFTFSDSWIHWVRQAPGKGLEWVAWIS | 110 |
| | PYGGSTYYADSVKGRFTISADTSKNTAYLQMNSLRAEDTAVYYCARRHWPGG | |
| | FDYWGQGTLVTVSSASTKGPSVFPLAPSSKSTSGGTAALGCLVKDYFPEPVT | |
| | VSWNSGALTSGVHTFPAVLQSSGLYSLSSVVTVPSSSLGTQTYICNVNHKPS | |
| | NTKVDKKVEPKSCDK [symbol] IWELKKDVYVVELDWYPDAPGEMVVLTCDTPE | |
| | EDGITWTLDQSSEVLGSGKTLTIQVKEFGDAGQYTCHKGGEVLSHSLLLLHK | |
| | KEDGIWSTDILKDQKEPKNKTFLRCEAKNYSGRFTCWWLTTISTDLTFSVKS | |
| | SRGSSDPQGVTCGAATLSAERVRGDNKEYEYSVECQEDSAAPAAEESLPIEV | |
| | MVDAVHKLKYENYTSSFFIRDIIKPDPPKNLQLKPLKNSRQVEVSWEYPDTW | |
| | STPHSYFSLTFSVQVQGKSKREKKDRVFTDKTSATVICRKNASISVRAQDRY | |
| | YSSSWSEWASVPCS | |
| Chain 2 | DIQMTQSPSSLSASVGDRVTITCRASQDVSTAVAWYQQKPGKAPKLLIYSAS | 111 |
| | FLYSGVPSRFSGSGSGTDFTLTISSLQPEDFATYYCQQYLYHPATFGQGTKV | |
| | EIKRTVAAPSVFIFPPSDEQLKSGTASVVCLLNNFYPREAKVQWKVDNALQS | |
| | GNSQESVTEQDSKDSTYSLSSTLTLSKADYEKHKVYACEVTHQGLSSPVTKS | |
| | FNRGEC [symbol] RNLPVATPDPGMFPCLHHSQNLLRAVSNMLQKARQTLEFYP | |
| | CTSEEIDHEDITKDKTSTVEACLPLELTKNESSLNSRETSFITNGSCLASRK | |
| | TSFMMALCLSSIYEDLKMYQVEFKTMNAKLLMDPKRQIFLDQNMLAVIDELM | |
| | QALNFNSETVPQKSSLEEPDFYKTKIKLCILLHAFRIRAVTIDRVMSYLNAS | |

P32233219

| | | |
|---|---|---|
| Chain 1 | EVQLVESGGGLVQPGGSLRLSCAASGFTFSDSWIHWVRQAPGKGLEWVAWIS | 112 |
| | PYGGSTYYADSVKGRFTISADTSKNTAYLQMNSLRAEDTAVYYCARRHWPGG | |
| | FDYWGQGTLVTVSSASTKGPSVFPLAPSSKSTSGGTAALGCLVKDYFPEPVT | |
| | VSWNSGALTSGVHTFPAVLQSSGLYSLSSVVTVPSSSLGTQTYICNVNHKPS | |
| | NTKVDKKVEPKSCDK [symbol] IWELKKDVYVVELDWYPDAPGEMVVLTCDTPE | |
| | EDGITWTLDQSSEVLGSGKTLTIQVKEFGDAGQYTCHKGGEVLSHSLLLLHK | |
| | KEDGIWSTDILKDQKEPKNKTFLRCEAKNYSGRFTCWWLTTISTDLTFSVKS | |
| | SRGSSDPQGVTCGAATLSAERVRGDNKEYEYSVECQEDSAAPAAEESLPIEV | |
| | MVDAVHKLKYENYTSSFFIRDIIKPDPPKNLQLKPLKNSRQVEVSWEYPDTW | |
| | STPHSYFSLTFSVQVQGQDQDEKKDRVFTDKTSATVICRKNASISVRAQDRY | |
| | YSSSWSEWASVPCS | |
| Chain 2 | DIQMTQSPSSLSASVGDRVTITCRASQDVSTAVAWYQQKPGKAPKLLIYSAS | 113 |
| | FLYSGVPSRFSGSGSGTDFTLTISSLQPEDFATYYCQQYLYHPATFGQGTKV | |
| | EIKRTVAAPSVFIFPPSDEQLKSGTASVVCLLNNFYPREAKVQWKVDNALQS | |
| | GNSQESVTEQDSKDSTYSLSSTLTLSKADYEKHKVYACEVTHQGLSSPVTKS | |
| | FNRGEC [symbol] RNLPVATPDPGMFPCLHHSQNLLRAVSNMLQKARQTLEFYP | |
| | CTSEEIDHEDITKDKTSTVEACLPLELTKNESSLNSRETSFITNGSCLASRK | |
| | TSFMMALCLSSIYEDLKMYQVEFKTMNAKLLMDPKRQIFLDQNMLAVIDELM | |
| | QALNFNSETVPQKSSLEEPDFYKTKIKLCILLHAFRIRAVTIDRVMSYLNAS | |

P32223220

| | | |
|---|---|---|
| Chain 1 | EVQLVESGGGLVQPGGSLRLSCAASGFTFSDSWIHWVRQAPGKGLEWVAWIS | 114 |
| | PYGGSTYYADSVKGRFTISADTSKNTAYLQMNSLRAEDTAVYYCARRHWPGG | |
| | FDYWGQGTLVTVSSASTKGPSVFPLAPSSKSTSGGTAALGCLVKDYFPEPVT | |
| | VSWNSGALTSGVHTFPAVLQSSGLYSLSSVVTVPSSSLGTQTYICNVNHKPS | |
| | NTKVDKKVEPKSCDK [symbol] IWELKKDVYVVELDWYPDAPGEMVVLTCDTPE | |
| | EDGITWTLDQSSEVLGSGKTLTIQVKEFGDAGQYTCHKGGEVLSHSLLLLHK | |
| | KEDGIWSTDILKDQKEPKNKTFLRCEAKNYSGRFTCWWLTTISTDLTFSVKS | |
| | SRGSSDPQGVTCGAATLSAERVRGDNKEYEYSVECQEDSAAPAAEESLPIEV | |
| | MVDAVHKLKYENYTSSFFIRDIIKPDPPKNLQLKPLKNSRQVEVSWEYPDTW | |
| | STPHSYFSLTFSVQVQGQDQDEKKDRVFTDKTSATVICRKNASISVRAQDRY | |
| | YSSSWSEWASVPCS | |
| Chain 2 | DIQMTQSPSSLSASVGDRVTITCRASQDVSTAVAWYQQKPGKAPKLLIYSAS | 115 |
| | FLYSGVPSRFSGSGSGTDFTLTISSLQPEDFATYYCQQYLYHPATFGQGTKV | |
| | EIKRTVAAPSVFIFPPSDEQLKSGTASVVCLLNNFYPREAKVQWKVDNALQS | |
| | GNSQESVTEQDSKDSTYSLSSTLTLSKADYEKHKVYACEVTHQGLSSPVTKS | |
| | FNRGEC [symbol] RNLPVATPDPGMFPCLHHSQNLLRAVSNMLQKARQTLEFYP | |
| | CTSEEIDHEDITKDKTSTVEACLPLELTKNESSLNSRETSFITNGSCLASRK | |
| | TSFMMALCLSSIYEDLKMYQVEFKTMNAKLLMDPKRQIFLDQNMLAVIDELM | |
| | QALNFNSETVPQKSSLEEPDFYKTKIKLCILLHAFRIRAVTIDRVMSYLNAS | |
| | A | |

P32233220

| | | |
|---|---|---|
| Chain 1 | EVQLVESGGGLVQPGGSLRLSCAASGFTFSDSWIHWVRQAPGKGLEWVAWIS | 116 |
| | PYGGSTYYADSVKGRFTISADTSKNTAYLQMNSLRAEDTAVYYCARRHWPGG | |
| | FDYWGQGTLVTVSSASTKGPSVFPLAPSSKSTSGGTAALGCLVKDYFPEPVT | |
| | VSWNSGALTSGVHTFPAVLQSSGLYSLSSVVTVPSSSLGTQTYICNVNHKPS | |
| | NTKVDKKVEPKSCDK [symbol] IWELKKDVYVVELDWYPDAPGEMVVLTCDTPE | |
| | EDGITWTLDQSSEVLGSGKTLTIQVKEFGDAGQYTCHKGGEVLSHSLLLLHK | |
| | KEDGIWSTDILKDQKEPKNKTFLRCEAKNYSGRFTCWWLTTISTDLTFSVKS | |
| | SRGSSDPQGVTCGAATLSAERVRGDNKEYEYSVECQEDSAAPAAEESLPIEV | |
| | MVDAVHKLKYENYTSSFFIRDIIKPDPPKNLQLKPLKNSRQVEVSWEYPDTW | |
| | STPHSYFSLTFSVQVQGQDQDEKKDRVFTDKTSATVICRKNASISVRAQDRY | |
| | YSSSWSEWASVPCS | |
| Chain 2 | DIQMTQSPSSLSASVGDRVTITCRASQDVSTAVAWYQQKPGKAPKLLIYSAS | 117 |
| | FLYSGVPSRFSGSGSGTDFTLTISSLQPEDFATYYCQQYLYHPATFGQGTKV | |
| | EIKRTVAAPSVFIFPPSDEQLKSGTASVVCLLNNFYPREAKVQWKVDNALQS | |
| | GNSQESVTEQDSKDSTYSLSSTLTLSKADYEKHKVYACEVTHQGLSSPVTKS | |
| | FNRGEC [symbol] RNLPVATPDPGMFPCLHHSQNLLRAVSNMLQKARQTLEFYP | |
| | CTSEEIDHEDITKDKTSTVEACLPLELTKNESSLNSRETSFITNGSCLASRK | |
| | TSFMMALCLSSIYEDLKMYQVEFKTMNAKLLMDPKRQIFLDQNMLAVIDELM | |
| | QALNFNSETVPQKSSLEEPDFYKTKIKLCILLHAFRIRAVTIDRVMSYLNAS | |
| | A | |

P32243227

| | | |
|---|---|---|
| Chain 1 | EVQLVESGGGLVQPGGSLRLSCAASGFTFSDSWIHWVRQAPGKGLEWVAWIS | 118 |
| | PYGGSTYYADSVKGRFTISADTSKNTAYLQMNSLRAEDTAVYYCARRHWPGG | |
| | FDYWGQGTLVTVSSASTKGPSVFPLAPSSKSTSGGTAALGCLVKDYFPEPVT | |
| | VSWNSGALTSGVHTFPAVLQSSGLYSLSSVVTVPSSSLGTQTYICNVNHKPS | |
| | NTKVDKKVEPKSCDK [symbol] RNLPVATPDPGMFPCLHHSQNLLRAVSNMLQK | |
| | ARQTLEFYPCTSEEIDHEDITKDKTSTVEACLPLELTKNESCLNSRETSFIT | |
| | NGSCLASRKTSFMMALCLSSIYEDLKMYQVEFKTMNAKLLMDPKRQIFLDQN | |
| | MLAVIDELMQALNFNSETVPQKSSLEEPDFYKTKIKLCILLHAFRIRAVTID | |
| | RVMSYLNAS | |
| Chain 2 | DIQMTQSPSSLSASVGDRVTITCRASQDVSTAVAWYQQKPGKAPKLLIYSAS | 119 |
| | FLYSGVPSRFSGSGSGTDFTLTISSLQPEDFATYYCQQYLYHPATFGQGTKV | |
| | EIKRTVAAPSVFIFPPSDEQLKSGTASVVCLLNNFYPREAKVQWKVDNALQS | |
| | GNSQESVTEQDSKDSTYSLSSTLTLSKADYEKHKVYACEVTHQGLSSPVTKS | |
| | FNRGEC [symbol] IWELKKDVYVVELDWYPDAPGEMVVLTCDTPEEDGITWTLD | |
| | QSSEVLGSGKTLTIQVKEFGDAGQYTCHKGGEVLSHSLLLLHKKEDGIWSTD | |
| | ILKDQKEPKNKTFLRCEAKNYSGRFTCWWLTTISTDLTFSVKSSRGSSDPQG | |
| | VTCGAATLSAERVRGDNKEYEYSVECQEDSACPAAEESLPIEVMVDAVHKLK | |
| | YENYTSSFFIRDIIKPDPPKNLQLKPLKNSRQVEVSWEYPDTWSTPHSYFSL | |
| | TFSVQVQGKSKREKKDRVFTDKTSATVICRKNASISVRAQDRYYSSSWSEWA | |
| | SVPCS | |

P3224302034

| | | |
|---|---|---|
| Chain 1 | EVQLVESGGGLVQPGGSLRLSCAASGFTFSDSWIHWVRQAPGKGLEWVAWIS | 120 |
| | PYGGSTYYADSVKGRFTISADTSKNTAYLQMNSLRAEDTAVYYCARRHWPGG | |
| | FDYWGQGTLVTVSSASTKGPSVFPLAPSSKSTSGGTAALGCLVKDYFPEPVT | |
| | VSWNSGALTSGVHTFPAVLQSSGLYSLSSVVTVPSSSLGTQTYICNVNHKPS | |
| | NTKVDKKVEPKSCDK [symbol] RNLPVATPDPGMFPCLHHSQNLLRAVSNMLQK | |
| | ARQTLEFYPCTSEEIDHEDITKDKTSTVEACLPLELTKNESCLNSRETSFIT | |
| | NGSCLASRKTSFMMALCLSSIYEDLKMYQVEFKTMNAKLLMDPKRQIFLDQN | |
| | MLAVIDELMQALNFNSETVPQKSSLEEPDFYKTKIKLCILLHAFRIRAVTID | |
| | RVMSYLNAS | |
| Chain 2 | IWELKKDVYVVELDWYPDAPGEMVVLTCDTPEEDGITWTLDQSSEVLGSGKT | 121 |
| | LTIQVKEFGDAGQYTCHKGGEVLSHSLLLLHKKEDGIWSTDILKDQKEPKNK | |
| | TFLRCEAKNYSGRFTCWWLTTISTDLTFSVKSSRGSSDPQGVTCGAATLSAE | |
| | RVRGDNKEYEYSVECQEDSACPAAEESLPIEVMVDAVHKLKYENYTSSFFIR | |
| | DIIKPDPPKNLQLKPLKNSRQVEVSWEYPDTWSTPHSYFSLTFCVQVQGKSK | |
| | REKKDRVFTDKTSATVICRKNASISVRAQDRYYSSSWSEWASVPCS | |
| Chain 3 | DIQMTQSPSSLSASVGDRVTITCRASQDVSTAVAWYQQKPGKAPKLLIYSAS | 122 |
| | FLYSGVPSRFSGSGSGTDFTLTISSLQPEDFATYYCQQYLYHPATFGQGTKV | |
| | EIKRTVAAPSVFIFPPSDEQLKSGTASVVCLLNNFYPREAKVQWKVDNALQS | |
| | GNSQESVTEQDSKDSTYSLSSTLTLSKADYEKHKVYACEVTHQGLSSPVTKS | |
| | FNRGEC | |

P32253228

| | | |
|---|---|---|
| Chain 1 | EVQLVESGGGLVQPGGSLRLSCAASGFTFSDSWIHWVRQAPGKGLEWVAWIS | 123 |
| | PYGGSTYYADSVKGRFTISADTSKNTAYLQMNSLRAEDTAVYYCARRHWPGG | |
| | FDYWGQGTLVTVSSASTKGPSVFPLAPSSKSTSGGTAALGCLVKDYFPEPVT | |
| | VSWNSGALTSGVHTFPAVLQSSGLYSLSSVVTVPSSSLGTQTYICNVNHKPS | |
| | NTKVDKKVEPKSCDK [symbol] RNLPVATPDPGMFPCLHHSQNLLRAVSNMLQK | |
| | ARQTLEFYPCTSEEIDHEDITKDKTSTVEACLPLELTKNESSLNSRETSFIT | |
| | NGSCLASRKTSFMMALCLSSIYEDLKMYQVEFKTMNAKLLMDPKRQIFLDQN | |
| | MLAVIDELMQALNFNSETVPQKSSLEEPDFYKTKIKLCILLHAFRIRAVTID | |
| | RVMSYLNAS | |
| Chain 2 | DIQMTQSPSSLSASVGDRVTITCRASQDVSTAVAWYQQKPGKAPKLLIYSAS | 124 |
| | FLYSGVPSRFSGSGSGTDFTLTISSLQPEDFATYYCQQYLYHPATFGQGTKV | |
| | EIKRTVAAPSVFIFPPSDEQLKSGTASVVCLLNNFYPREAKVQWKVDNALQS | |
| | GNSQESVTEQDSKDSTYSLSSTLTLSKADYEKHKVYACEVTHQGLSSPVTKS | |
| | FNRGEC [symbol] IWELKKDVYVVELDWYPDAPGEMVVLTCDTPEEDGITWTLD | |
| | QSSEVLGSGKTLTIQVKEFGDAGQYTCHKGGEVLSHSLLLLHKKEDGIWSTD | |
| | ILKDQKEPKNKTFLRCEAKNYSGRFTCWWLTTISTDLTFSVKSSRGSSDPQG | |
| | VTCGAATLSAERVRGDNKEYEYSVECQEDSAAPAAEESLPIEVMVDAVHKLK | |
| | YENYTSSFFIRDIIKPDPPKNLQLKPLKNSRQVEVSWEYPDTWSTPHSYFSL | |
| | TFSVQVQGKSKREKKDRVFTDKTSATVICRKNASISVRAQDRYYSSSWSEWA | |
| | SVPCS | |

P32253229

| | | |
|---|---|---|
| Chain 1 | EVQLVESGGGLVQPGGSLRLSCAASGFTFSDSWIHWVRQAPGKGLEWVAWIS | 125 |
| | PYGGSTYYADSVKGRFTISADTSKNTAYLQMNSLRAEDTAVYYCARRHWPGG | |
| | FDYWGQGTLVTVSSASTKGPSVFPLAPSSKSTSGGTAALGCLVKDYFPEPVT | |
| | VSWNSGALTSGVHTFPAVLQSSGLYSLSSVVTVPSSSLGTQTYICNVNHKPS | |
| | NTKVDKKVEPKSCDK [symbol] RNLPVATPDPGMFPCLHHSQNLLRAVSNMLQK | |
| | ARQTLEFYPCTSEEIDHEDITKDKTSTVEACLPLELTKNESSLNSRETSFIT | |
| | NGSCLASRKTSFMMALCLSSIYEDLKMYQVEFKTMNAKLLMDPKRQIFLDQN | |
| | MLAVIDELMQALNFNSETVPQKSSLEEPDFYKTKIKLCILLHAFRIRAVTID | |
| | RVMSYLNAS | |
| Chain 2 | DIQMTQSPSSLSASVGDRVTITCRASQDVSTAVAWYQQKPGKAPKLLIYSAS | 126 |
| | FLYSGVPSRFSGSGSGTDFTLTISSLQPEDFATYYCQQYLYHPATFGQGTKV | |
| | EIKRTVAAPSVFIFPPSDEQLKSGTASVVCLLNNFYPREAKVQWKVDNALQS | |
| | GNSQESVTEQDSKDSTYSLSSTLTLSKADYEKHKVYACEVTHQGLSSPVTKS | |
| | FNRGEC [symbol] IWELKKDVYVVELDWYPDAPGEMVVLTCDTPEEDGITWTLD | |
| | QSSEVLGSGKTLTIQVKEFGDAGQYTCHKGGEVLSHSLLLLHKKEDGIWSTD | |
| | ILKDQKEPKNKTFLRCEAKNYSGRFTCWWLTTISTDLTFSVKSSRGSSDPQG | |
| | VTCGAATLSAERVRGDNKEYEYSVECQEDSAAPAAEESLPIEVMVDAVHKLK | |
| | YENYTSSFFIRDIIKPDPPKNLQLKPLKNSRQVEVSWEYPDTWSTPHSYFSL | |
| | TFSVQVQGQDQDEKKDRVFTDKTSATVICRKNASISVRAQDRYYSSSWSEWA | |
| | SVPCS | |

P32263228

| | | |
|---|---|---|
| Chain 1 | EVQLVESGGGLVQPGGSLRLSCAASGFTFSDSWIHWVRQAPGKGLEWVAWIS | 127 |
| | PYGGSTYYADSVKGRFTISADTSKNTAYLQMNSLRAEDTAVYYCARRHWPGG | |
| | FDYWGQGTLVTVSSASTKGPSVFPLAPSSKSTSGGTAALGCLVKDYFPEPVT | |
| | VSWNSGALTSGVHTFPAVLQSSGLYSLSSVVTVPSSSLGTQTYICNVNHKPS | |
| | NTKVDKKVEPKSCDK [symbol] RNLPVATPDPGMFPCLHHSQNLLRAVSNMLQK | |
| | ARQTLEFYPCTSEEIDHEDITKDKTSTVEACLPLELTKNESSLNSRETSFIT | |
| | NGSCLASRKTSFMMALCLSSIYEDLKMYQVEFKTMNAKLLMDPKRQIFLDQN | |
| | MLAVIDELMQALNFNSETVPQKSSLEEPDFYKTKIKLCILLHAFRIRAVTID | |
| | RVMSYLNASA | |
| Chain 2 | DIQMTQSPSSLSASVGDRVTITCRASQDVSTAVAWYQQKPGKAPKLLIYSAS | 128 |
| | FLYSGVPSRFSGSGSGTDFTLTISSLQPEDFATYYCQQYLYHPATFGQGTKV | |
| | EIKRTVAAPSVFIFPPSDEQLKSGTASVVCLLNNFYPREAKVQWKVDNALQS | |
| | GNSQESVTEQDSKDSTYSLSSTLTLSKADYEKHKVYACEVTHQGLSSPVTKS | |
| | FNRGEC [symbol] IWELKKDVYVVELDWYPDAPGEMVVLTCDTPEEDGITWTLD | |
| | QSSEVLGSGKTLTIQVKEFGDAGQYTCHKGGEVLSHSLLLLHKKEDGIWSTD | |
| | ILKDQKEPKNKTFLRCEAKNYSGRFTCWWLTTISTDLTFSVKSSRGSSDPQG | |
| | VTCGAATLSAERVRGDNKEYEYSVECQEDSAAPAAEESLPIEVMVDAVHKLK | |
| | YENYTSSFFIRDIIKPDPPKNLQLKPLKNSRQVEVSWEYPDTWSTPHSYFSL | |
| | TFSVQVQGKSKREKKDRVFTDKTSATVICRKNASISVRAQDRYYSSSWSEWA | |
| | SVPCS | |

P32263229

| | | |
|---|---|---|
| Chain 1 | EVQLVESGGGLVQPGGSLRLSCAASGFTFSDSWIHWVRQAPGKGLEWVAWIS | 129 |
| | PYGGSTYYADSVKGRFTISADTSKNTAYLQMNSLRAEDTAVYYCARRHWPGG | |
| | FDYWGQGTLVTVSSASTKGPSVFPLAPSSKSTSGGTAALGCLVKDYFPEPVT | |
| | VSWNSGALTSGVHTFPAVLQSSGLYSLSSVVTVPSSSLGTQTYICNVNHKPS | |
| | NTKVDKKVEPKSCDK [symbol] RNLPVATPDPGMFPCLHHSQNLLRAVSNMLQK | |
| | ARQTLEFYPCTSEEIDHEDITKDKTSTVEACLPLELTKNESSLNSRETSFIT | |
| | NGSCLASRKTSFMMALCLSSIYEDLKMYQVEFKTMNAKLLMDPKRQIFLDQN | |
| | MLAVIDELMQALNFNSETVPQKSSLEEPDFYKTKIKLCILLHAFRIRAVTID | |
| | RVMSYLNASA | |
| Chain 2 | DIQMTQSPSSLSASVGDRVTITCRASQDVSTAVAWYQQKPGKAPKLLIYSAS | 130 |
| | FLYSGVPSRFSGSGSGTDFTLTISSLQPEDFATYYCQQYLYHPATFGQGTKV | |
| | EIKRTVAAPSVFIFPPSDEQLKSGTASVVCLLNNFYPREAKVQWKVDNALQS | |
| | GNSQESVTEQDSKDSTYSLSSTLTLSKADYEKHKVYACEVTHQGLSSPVTKS | |
| | FNRGEC [symbol] IWELKKDVYVVELDWYPDAPGEMVVLTCDTPEEDGITWTLD | |
| | QSSEVLGSGKTLTIQVKEFGDAGQYTCHKGGEVLSHSLLLLHKKEDGIWSTD | |
| | ILKDQKEPKNKTFLRCEAKNYSGRFTCWWLTTISTDLTFSVKSSRGSSDPQG | |
| | VTCGAATLSAERVRGDNKEYEYSVECQEDSAAPAAEESLPIEVMVDAVHKLK | |
| | YENYTSSFFIRDIIKPDPPKNLQLKPLKNSRQVEVSWEYPDTWSTPHSYFSL | |
| | TFSVQVQGQDQDEKKDRVFTDKTSATVICRKNASISVRAQDRYYSSSWSEWA | |
| | SVPCS | |

P35123513

| | | |
|---|---|---|
| Chain 1 | QVQLVESGGGVVQPGRSLRLDCKASGITFSNSGMHWVRQAPGKGLEWVAVIW | 131 |
| | YDGSKRYYADSVKGRFTISRDNSKNTLFLQMNSLRAEDTAVYYCATNDDYWG | |
| | QGTLVTVSSASTKGPSVFPLAPSSKSTSGGTAALGCLVKDYFPEPVTVSWNS | |
| | GALTSGVHTFPAVLQSSGLYSLSSVVTVPSSSLGTQTYICNVNHKPSNTKVD | |
| | KKVEPKSCDKGGGGSIWELKKDVYVVELDWYPDAPGEMVVLTCDTPEEDGIT | |
| | WTLDQSSEVLGSGKTLTIQVKEFGDAGQYTCHKGGEVLSHSLLLLHKKEDGI | |
| | WSTDILKDQKEPKNKTFLRCEAKNYSGRFTCWWLTTISTDLTFSVKSSRGSS | |
| | DPQGVTCGAATLSAERVRGDNKEYEYSVECQEDSAAPAAEESLPIEVMVDAV | |
| | HKLKYENYTSSFFIRDIIKPDPPKNLQLKPLKNSRQVEVSWEYPDTWSTPHS | |
| | YFSLTFSVQVQGQDQDEKKDRVFTDKTSATVICRKNASISVRAQDRYYSSSW | |
| | SEWASVPCS | |
| Chain 2 | EIVLTQSPATLSLSPGERATLSCRASQSVSSYLAWYQQKPGQAPRLLIYDAS | 132 |
| | NRATGIPARFSGSGSGTDFTLTISSLEPEDFAVYYCQQSSNWPRTFGQGTKV | |
| | EIKRTVAAPSVFIFPPSDEQLKSGTASVVCLLNNFYPREAKVQWKVDNALQS | |
| | GNSQESVTEQDSKDSTYSLSSTLTLSKADYEKHKVYACEVTHQGLSSPVTKS | |
| | FNRGECGGGGSRNLPVATPDPGMFPCLHHSQNLLRAVSNMLQKARQTLEFYP | |
| | CTSEEIDHEDITKDKTSTVEACLPLELTKNESSLNSRETSFITNGSCLASRK | |
| | TSFMMALCLSSIYEDLKMYQVEFKTMNAKLLMDPKRQIFLDQNMLAVIDELM | |
| | QALNFNSETVPQKSSLEEPDEDKTKIKLCILLHAFRIRAVTIDRVMSYLNAS | |

P35123514

| | | |
|---|---|---|
| Chain 1 | QVQLVESGGGVVQPGRSLRLDCKASGITFSNSGMHWVRQAPGKGLEWVAVIW | 133 |
| | YDGSKRYYADSVKGRFTISRDNSKNTLFLQMNSLRAEDTAVYYCATNDDYWG | |
| | QGTLVTVSSASTKGPSVFPLAPSSKSTSGGTAALGCLVKDYFPEPVTVSWNS | |
| | GALTSGVHTFPAVLQSSGLYSLSSVVTVPSSSLGTQTYICNVNHKPSNTKVD | |
| | KKVEPKSCDKGGGGSIWELKKDVYVVELDWYPDAPGEMVVLTCDTPEEDGIT | |
| | WTLDQSSEVLGSGKTLTIQVKEFGDAGQYTCHKGGEVLSHSLLLLHKKEDGI | |
| | WSTDILKDQKEPKNKTFLRCEAKNYSGRFTCWWLTTISTDLTFSVKSSRGSS | |
| | DPQGVTCGAATLSAERVRGDNKEYEYSVECQEDSAAPAAEESLPIEVMVDAV | |
| | HKLKYENYTSSFFIRDIIKPDPPKNLQLKPLKNSRQVEVSWEYPDTWSTPHS | |
| | YFSLTFSVQVQGQDQDEKKDRVFTDKTSATVICRKNASISVRAQDRYYSSSW | |
| | SEWASVPCS | |
| Chain 2 | EIVLTQSPATLSLSPGERATLSCRASQSVSSYLAWYQQKPGQAPRLLIYDAS | 134 |
| | NRATGIPARFSGSGSGTDFTLTISSLEPEDFAVYYCQQSSNWPRTFGQGTKV | |
| | EIKRTVAAPSVFIFPPSDEQLKSGTASVVCLLNNFYPREAKVQWKVDNALQS | |
| | GNSQESVTEQDSKDSTYSLSSTLTLSKADYEKHKVYACEVTHQGLSSPVTKS | |
| | FNRGECGGGGSRNLPVATPDPGMFPCLHHSQNLLRAVSNMLQKARQTLEFYP | |
| | CTSEEIDHEDITKDKTSTVEACLPLELTKNESSLNSRETSFITNGSCLASRK | |
| | TSFMMALCLSSIYEDLKMYQVEFKTMNAKLLMDPKRQIFLDQNMLAVIDELM | |
| | QALNFNSETVPQKSSLEEPDFEKTKIKLCILLHAFRIRAVTIDRVMSYLNAS | |

P35123515

| | | |
|---|---|---|
| Chain 1 | QVQLVESGGGVVQPGRSLRLDCKASGITFSNSGMHWVRQAPGKGLEWVAVIW | 135 |
| | YDGSKRYYADSVKGRFTISRDNSKNTLFLQMNSLRAEDTAVYYCATNDDYWG | |
| | QGTLVTVSSASTKGPSVFPLAPSSKSTSGGTAALGCLVKDYFPEPVTVSWNS | |
| | GALTSGVHTFPAVLQSSGLYSLSSVVTVPSSSLGTQTYICNVNHKPSNTKVD | |
| | KKVEPKSCDKGGGGSIWELKKDVYVVELDWYPDAPGEMVVLTCDTPEEDGIT | |
| | WTLDQSSEVLGSGKTLTIQVKEFGDAGQYTCHKGGEVLSHSLLLLHKKEDGI | |
| | WSTDILKDQKEPKNKTFLRCEAKNYSGRFTCWWLTTISTDLTFSVKSSRGSS | |
| | DPQGVTCGAATLSAERVRGDNKEYEYSVECQEDSAAPAAEESLPIEVMVDAV | |
| | HKLKYENYTSSFFIRDIIKPDPPKNLQLKPLKNSRQVEVSWEYPDTWSTPHS | |
| | YFSLTFSVQVQGQDQDEKKDRVFTDKTSATVICRKNASISVRAQDRYYSSSW | |
| | SEWASVPCS | |
| Chain 2 | EIVLTQSPATLSLSPGERATLSCRASQSVSSYLAWYQQKPGQAPRLLIYDAS | 136 |
| | NRATGIPARFSGSGSGTDFTLTISSLEPEDFAVYYCQQSSNWPRTFGQGTKV | |
| | EIKRTVAAPSVFIFPPSDEQLKSGTASVVCLLNNFYPREAKVQWKVDNALQS | |
| | GNSQESVTEQDSKDSTYSLSSTLTLSKADYEKHKVYACEVTHQGLSSPVTKS | |
| | FNRGECGGGGSRNLPVATPDPGMFPCLHHSQNLLRAVSNMLQKARQTLEFYP | |
| | CTSEEIDHEDITKDKTSTVEACLPLELTKNESSLNSRETSFITNGSCLASRK | |
| | TSFMMALCLSSIYEDLKMYQVEFKTMNAKLLMDPKRQIFLDQNMLAVIDELM | |
| | QALNFNSETVPQKSSLEEPDFFKTKIKLCILLHAFRIRAVTIDRVMSYLNAS | |

P32233502

| | | |
|---|---|---|
| Chain 1 | EVQLVESGGGLVQPGGSLRLSCAASGFTESDSWIHWVRQAPGKGLEWVAWIS | 137 |
| | PYGGSTYYADSVKGRFTISADTSKNTAYLQMNSLRAEDTAVYYCARRHWPGG | |
| | FDYWGQGTLVTVSSASTKGPSVFPLAPSSKSTSGGTAALGCLVKDYFPEPVT | |
| | VSWNSGALTSGVHTFPAVLQSSGLYSLSSVVTVPSSSLGTQTYICNVNHKPS | |
| | NTKVDKKVEPKSCDKGGGGSIWELKKDVYVVELDWYPDAPGEMVVLTCDTPE | |
| | EDGITWTLDQSSEVLGSGKTLTIQVKEFGDAGQYTCHKGGEVLSHSLLLLHK | |
| | KEDGIWSTDILKDQKEPKNKTFLRCEAKNYSGRFTCWWLTTISTDLTFSVKS | |
| | SRGSSDPQGVTCGAATLSAERVRGDNKEYEYSVECQEDSAAPAAEESLPIEV | |
| | MVDAVHKLKYENYTSSFFIRDIIKPDPPKNLQLKPLKNSRQVEVSWEYPDTW | |
| | STPHSYFSLTFSVQVQGQDQDEKKDRVFTDKTSATVICRKNASISVRAQDRY | |
| | YSSSWSEWASVPCS | |
| Chain 2 | DIQMTQSPSSLSASVGDRVTITCRASQDVSTAVAWYQQKPGKAPKLLIYSAS | 138 |
| | FLYSGVPSRFSGSGSGTDFTLTISSLQPEDFATYYCQQYLYHPATFGQGTKV | |
| | EIKRTVAAPSVFIFPPSDEQLKSGTASVVCLLNNFYPREAKVQWKVDNALQS | |
| | GNSQESVTEQDSKDSTYSLSSTLTLSKADYEKHKVYACEVTHQGLSSPVTKS | |
| | FNRGECGGGGSRNLPVATPDPGMFPCLHHSQNLLRAVSNMLQKARQTLEFYP | |
| | CTSEEIDHEDITKDKTSTVEACLPLELTKNESSLNSRETSFITNGSCLASRK | |
| | TSFMMALCLSSIYEDLKMYQVEFKTMNAKLLMDPKRQIFLDQNMLAVIDELM | |
| | QALNFNSETVPQKSSLEEPDFK | |
| | KTKIKLCILLHAFRIRAVTIDRVMSYLNAS | |

P32233503

| | | |
|---|---|---|
| Chain 1 | EVQLVESGGGLVQPGGSLRLSCAASGFTFSDSWIHWVRQAPGKGLEWVAWIS | 139 |
| | PYGGSTYYADSVKGRFTISADTSKNTAYLQMNSLRAEDTAVYYCARRHWPGG | |
| | FDYWGQGTLVTVSSASTKGPSVFPLAPSSKSTSGGTAALGCLVKDYFPEPVT | |
| | VSWNSGALTSGVHTFPAVLQSSGLYSLSSVVTVPSSSLGTQTYICNVNHKPS | |
| | NTKVDKKVEPKSCDKGGGGSIWELKKDVYVVELDWYPDAPGEMVVLTCDTPE | |
| | EDGITWTLDQSSEVLGSGKTLTIQVKEFGDAGQYTCHKGGEVLSHSLLLLHK | |
| | KEDGIWSTDILKDQKEPKNKTFLRCEAKNYSGRFTCWWLTTISTDLTFSVKS | |
| | SRGSSDPQGVTCGAATLSAERVRGDNKEYEYSVECQEDSAAPAAEESLPIEV | |
| | MVDAVHKLKYENYTSSFFIRDIIKPDPPKNLQLKPLKNSRQVEVSWEYPDTW | |
| | STPHSYFSLTFSVQVQGQDQDEKKDRVFTDKTSATVICRKNASISVRAQDRY | |
| | YSSSWSEWASVPCS | |
| Chain 2 | DIQMTQSPSSLSASVGDRVTITCRASQDVSTAVAWYQQKPGKAPKLLIYSAS | 140 |
| | FLYSGVPSRFSGSGSGTDFTLTISSLQPEDFATYYCQQYLYHPATFGQGTKV | |
| | EIKRTVAAPSVFIFPPSDEQLKSGTASVVCLLNNFYPREAKVQWKVDNALQS | |
| | GNSQESVTEQDSKDSTYSLSSTLTLSKADYEKHKVYACEVTHQGLSSPVTKS | |
| | FNRGECGGGGSRNLPVATPDPGMFPCLHHSQNLLRAVSNMLQKARQTLEFYP | |
| | CTSEEIDHEDITKDKTSTVEACLPLELTKNESSLNSRETSFITNGSCLASRK | |
| | TSFMMALCLSSIYEDLKMYQVEFKTMNAKLLMDPKRQIFLDQNMLAVIDELM | |
| | QALNFNSETVPQKSSLEEPDEMKTKIKLCILLHAFRIRAVTIDRVMSYLNAS | |

P32233504

| | | |
|---|---|---|
| Chain 1 | EVQLVESGGGLVQPGGSLRLSCAASGFTFSDSWIHWVRQAPGKGLEWVAWIS | 141 |
| | PYGGSTYYADSVKGRFTISADTSKNTAYLQMNSLRAEDTAVYYCARRHWPGG | |
| | FDYWGQGTLVTVSSASTKGPSVFPLAPSSKSTSGGTAALGCLVKDYFPEPVT | |
| | VSWNSGALTSGVHTFPAVLQSSGLYSLSSVVTVPSSSLGTQTYICNVNHKPS | |
| | NTKVDKKVEPKSCDKGGGGSIWELKKDVYVVELDWYPDAPGEMVVLTCDTPE | |
| | EDGITWTLDQSSEVLGSGKTLTIQVKEFGDAGQYTCHKGGEVLSHSLLLLHK | |
| | KEDGIWSTDILKDQKEPKNKTFLRCEAKNYSGRFTCWWLTTISTDLTFSVKS | |
| | SRGSSDPQGVTCGAATLSAERVRGDNKEYEYSVECQEDSAAPAAEESLPIEV | |
| | MVDAVHKLKYENYTSSFFIRDIIKPDPPKNLQLKPLKNSRQVEVSWEYPDTW | |
| | STPHSYFSLTFSVQVQGQDQDEKKDRVFTDKTSATVICRKNASISVRAQDRY | |
| | YSSSWSEWASVPCS | |
| Chain 2 | DIQMTQSPSSLSASVGDRVTITCRASQDVSTAVAWYQQKPGKAPKLLIYSAS | 142 |
| | FLYSGVPSRFSGSGSGTDFTLTISSLQPEDFATYYCQQYLYHPATFGQGTKV | |
| | EIKRTVAAPSVFIFPPSDEQLKSGTASVVCLLNNFYPREAKVQWKVDNALQS | |
| | GNSQESVTEQDSKDSTYSLSSTLTLSKADYEKHKVYACEVTHQGLSSPVTKS | |
| | FNRGECGGGGSRNLPVATPDPGMFPCLHHSQNLLRAVSNMLQKARQTLEFYP | |
| | CTSEEIDHEDITKDKTSTVEACLPLELTKNESSLNSRETSFITNGSCLASRK | |
| | TSFMMALCLSSIYEDLKMYQVEFKTMNAKLLMDPKRQIFLDQNMLAVIDELM | |
| | QALNFNSETVPQKSSLEEPDFPKTKIKLCILLHAFRIRAVTIDRVMSYLNAS | |

P32233505

| | | |
|---|---|---|
| Chain 1 | EVQLVESGGGLVQPGGSLRLSCAASGFTFSDSWIHWVRQAPGKGLEWVAWIS | 143 |
| | PYGGSTYYADSVKGRFTISADTSKNTAYLQMNSLRAEDTAVYYCARRHWPGG | |
| | FDYWGQGTLVTVSSASTKGPSVFPLAPSSKSTSGGTAALGCLVKDYFPEPVT | |
| | VSWNSGALTSGVHTFPAVLQSSGLYSLSSVVTVPSSSLGTQTYICNVNHKPS | |
| | NTKVDKKVEPKSCDKGGGGSIWELKKDVYVVELDWYPDAPGEMVVLTCDTPE | |
| | EDGITWTLDQSSEVLGSGKTLTIQVKEFGDAGQYTCHKGGEVLSHSLLLLHK | |
| | KEDGIWSTDILKDQKEPKNKTFLRCEAKNYSGRFTCWWLTTISTDLTFSVKS | |
| | SRGSSDPQGVTCGAATLSAERVRGDNKEYEYSVECQEDSAAPAAEESLPIEV | |
| | MVDAVHKLKYENYTSSFFIRDIIKPDPPKNLQLKPLKNSRQVEVSWEYPDTW | |
| | STPHSYFSLTFSVQVQGQDQDEKKDRVFTDKTSATVICRKNASISVRAQDRY | |
| | YSSSWSEWASVPCS | |
| Chain 2 | DIQMTQSPSSLSASVGDRVTITCRASQDVSTAVAWYQQKPGKAPKLLIYSAS | 144 |
| | FLYSGVPSRFSGSGSGTDFTLTISSLQPEDFATYYCQQYLYHPATFGQGTKV | |
| | EIKRTVAAPSVFIFPPSDEQLKSGTASVVCLLNNFYPREAKVQWKVDNALQS | |
| | GNSQESVTEQDSKDSTYSLSSTLTLSKADYEKHKVYACEVTHQGLSSPVTKS | |
| | FNRGECGGGGSRNLPVATPDPGMFPCLHHSQNLLRAVSNMLQKARQTLEFYP | |
| | CTSEEIDHEDITKDKTSTVEACLPLELTKNESSLNSRETSFITNGSCLASRK | |
| | TSFMMALCLSSIYEDLKMYQVEFKTMNAKLLMDPKRQIFLDQNMLAVIDELM | |
| | QALNFNSETVPQKSSLEEPDERKTKIKLCILLHAFRIRAVTIDRVMSYLNAS | |

P32233506

| | | |
|---|---|---|
| Chain 1 | EVQLVESGGGLVQPGGSLRLSCAASGFTFSDSWIHWVRQAPGKGLEWVAWIS | 145 |
| | PYGGSTYYADSVKGRFTISADTSKNTAYLQMNSLRAEDTAVYYCARRHWPGG | |
| | FDYWGQGTLVTVSSASTKGPSVFPLAPSSKSTSGGTAALGCLVKDYFPEPVT | |
| | VSWNSGALTSGVHTFPAVLQSSGLYSLSSVVTVPSSSLGTQTYICNVNHKPS | |
| | NTKVDKKVEPKSCDKGGGGSIWELKKDVYVVELDWYPDAPGEMVVLTCDTPE | |
| | EDGITWTLDQSSEVLGSGKTLTIQVKEFGDAGQYTCHKGGEVLSHSLLLLHK | |
| | KEDGIWSTDILKDQKEPKNKTFLRCEAKNYSGRFTCWWLTTISTDLTFSVKS | |
| | SRGSSDPQGVTCGAATLSAERVRGDNKEYEYSVECQEDSAAPAAEESLPIEV | |
| | MVDAVHKLKYENYTSSFFIRDIIKPDPPKNLQLKPLKNSRQVEVSWEYPDTW | |
| | STPHSYFSLTFSVQVQGQDQDEKKDRVFTDKTSATVICRKNASISVRAQDRY | |
| | YSSSWSEWASVPCS | |
| Chain 2 | DIQMTQSPSSLSASVGDRVTITCRASQDVSTAVAWYQQKPGKAPKLLIYSAS | 146 |
| | FLYSGVPSRFSGSGSGTDFTLTISSLQPEDFATYYCQQYLYHPATFGQGTKV | |
| | EIKRTVAAPSVFIFPPSDEQLKSGTASVVCLLNNFYPREAKVQWKVDNALQS | |
| | GNSQESVTEQDSKDSTYSLSSTLTLSKADYEKHKVYACEVTHQGLSSPVTKS | |
| | FNRGECGGGGSRNLPVATPDPGMFPCLHHSQNLLRAVSNMLQKARQTLEFYP | |
| | CTSEEIDHEDITKDKTSTVEACLPLELTKNESSLNSRETSFITNGSCLASRK | |
| | TSFMMALCLSSIYEDLKMYQVEFKTMNAKLLMDPKRQIFLDQNMLAVIDELM | |
| | QALNFNSETVPQKSSLEEPDFWKTKIKLCILLHAFRIRAVTIDRVMSYLNAS | |

P36673219

| | | |
|---|---|---|
| Chain 1 | EVQLVESGGGLVQPGGSLRLSCAASGFTFSDSWIHWVRQAPGKGLEWVAWIS | 147 |
| | PYGGSTYYADSVKGRFTISADTSKNTAYLQMNSLRAEDTAVYYCARRHWPGG | |
| | FDYWGQGTLVTVSSASTKGPSVFPLAPSSKSTSGGTAALGCLVKDYFPEPVT | |
| | VSWNSGALTSGVHTFPAVLQSSGLYSLSSVVTVPSSSLGTQTYICNVNHKPS | |
| | NTKVDKKVEPKSCDKGGGGSSGRSDNRGGGGSIWELKKDVYVVELDWYPDAP | |
| | GEMVVLTCDTPEEDGITWTLDQSSEVLGSGKTLTIQVKEFGDAGQYTCHKGG | |
| | EVLSHSLLLLHKKEDGIWSTDILKDQKEPKNKTFLRCEAKNYSGRFTCWWLT | |
| | TISTDLTFSVKSSRGSSDPQGVTCGAATLSAERVRGDNKEYEYSVECQEDSA | |
| | APAAEESLPIEVMVDAVHKLKYENYTSSFFIRDIIKPDPPKNLQLKPLKNSR | |
| | QVEVSWEYPDTWSTPHSYFSLTFSVQVQGQDQDEKKDRVFTDKTSATVICRK | |
| | NASISVRAQDRYYSSSWSEWASVPCS | |
| Chain 2 | DIQMTQSPSSLSASVGDRVTITCRASQDVSTAVAWYQQKPGKAPKLLIYSAS | 148 |
| | FLYSGVPSRFSGSGSGTDFTLTISSLQPEDFATYYCQQYLYHPATFGQGTKV | |
| | EIKRTVAAPSVFIFPPSDEQLKSGTASVVCLLNNFYPREAKVQWKVDNALQS | |
| | GNSQESVTEQDSKDSTYSLSSTLTLSKADYEKHKVYACEVTHQGLSSPVTKS | |
| | FNRGECGGGGSRNLPVATPDPGMFPCLHHSQNLLRAVSNMLQKARQTLEFYP | |
| | CTSEEIDHEDITKDKTSTVEACLPLELTKNESSLNSRETSFITNGSCLASRK | |
| | TSFMMALCLSSIYEDLKMYQVEFKTMNAKLLMDPKRQIFLDQNMLAVIDELM | |
| | QALNFNSETVPQKSSLEEPDFYKTKIKLCILLHAFRIRAVTIDRVMSYLNAS | |

P36673668

| | | |
|---|---|---|
| Chain 1 | EVQLVESGGGLVQPGGSLRLSCAASGFTFSDSWIHWVRQAPGKGLEWVAWIS | 149 |
| | PYGGSTYYADSVKGRFTISADTSKNTAYLQMNSLRAEDTAVYYCARRHWPGG | |
| | FDYWGQGTLVTVSSASTKGPSVFPLAPSSKSTSGGTAALGCLVKDYFPEPVT | |
| | VSWNSGALTSGVHTFPAVLQSSGLYSLSSVVTVPSSSLGTQTYICNVNHKPS | |
| | NTKVDKKVEPKSCDKGGGGSSGRSDNRGGGGSIWELKKDVYVVELDWYPDAP | |
| | GEMVVLTCDTPEEDGITWTLDQSSEVLGSGKTLTIQVKEFGDAGQYTCHKGG | |
| | EVLSHSLLLLHKKEDGIWSTDILKDQKEPKNKTFLRCEAKNYSGRFTCWWLT | |
| | TISTDLTFSVKSSRGSSDPQGVTCGAATLSAERVRGDNKEYEYSVECQEDSA | |
| | APAAEESLPIEVMVDAVHKLKYENYTSSFFIRDIIKPDPPKNLQLKPLKNSR | |
| | QVEVSWEYPDTWSTPHSYFSLTFSVQVQGQDQDEKKDRVFTDKTSATVICRK | |
| | NASISVRAQDRYYSSSWSEWASVPCS | |
| Chain 2 | DIQMTQSPSSLSASVGDRVTITCRASQDVSTAVAWYQQKPGKAPKLLIYSAS | 150 |
| | FLYSGVPSRFSGSGSGTDFTLTISSLQPEDFATYYCQQYLYHPATFGQGTKV | |
| | EIKRTVAAPSVFIFPPSDEQLKSGTASVVCLLNNFYPREAKVQWKVDNALQS | |
| | GNSQESVTEQDSKDSTYSLSSTLTLSKADYEKHKVYACEVTHQGLSSPVTKS | |
| | FNRGECGGGGSPLGLAGRNLPVATPDPGMFPCLHHSQNLLRAVSNMLQKARQ | |
| | TLEFYPCTSEEIDHEDITKDKTSTVEACLPLELTKNESSLNSRETSFITNGS | |
| | CLASRKTSFMMALCLSSIYEDLKMYQVEFKTMNAKLLMDPKRQIFLDQNMLA | |
| | VIDELMQALNFNSETVPQKSSLEEPDFYKTKIKLCILLHAFRIRAVTIDRVM | |
| | SYLNAS | |

P36693670

| | | |
|---|---|---|
| Chain 1 | QVQLVQSGAEVKKPGASVKVSCKASGYTFTMNIIHWVRQAPGQGLEWMGWIH | 151 |
| | PGSGAIKYAQKLQGRVTMTTDTSTSTAYMELRSLRSDDTAVYYCARHGGTGR | |
| | GAMDYWGQGTLVTVSSASTKGPSVFPLAPSSKSTSGGTAALGCLVKDYFPEP | |
| | VTVSWNSGALTSGVHTFPAVLQSSGLYSLSSVVTVPSSSLGTQTYICNVNHK | |
| | PSNTKVDKKVEPKSCDKGGGGSSGRSDNRGGGGSIWELKKDVYVVELDWYPD | |
| | APGEMVVLTCDTPEEDGITWTLDQSSEVLGSGKTLTIQVKEFGDAGQYTCHK | |
| | GGEVLSHSLLLLHKKEDGIWSTDILKDQKEPKNKTFLRCEAKNYSGRFTCWW | |
| | LTTISTDLTFSVKSSRGSSDPQGVTCGAATLSAERVRGDNKEYEYSVECQED | |
| | SAAPAAEESLPIEVMVDAVHKLKYENYTSSFFIRDIIKPDPPKNLQLKPLKN | |
| | SRQVEVSWEYPDTWSTPHSYFSLTFSVQVQGQDQDEKKDRVFTDKTSATVIC | |
| | RKNASISVRAQDRYYSSSWSEWASVPCS | |
| Chain 2 | EIVLTQSPGTLSLSPGERATLSCRASQSVSTSAYSYMHWYQQKPGQAPRLLI | 152 |
| | YLASNLESGIPDRESGSGSGTDFTLTISRLEPEDFAVYYCQQSRELPYTFGQ | |
| | GTKLEIKRTVAAPSVFIFPPSDEQLKSGTASVVCLLNNFYPREAKVQWKVDN | |
| | ALQSGNSQESVTEQDSKDSTYSLSSTLTLSKADYEKHKVYACEVTHQGLSSP | |
| | VTKSFNRGECGGGGSRNLPVATPDPGMFPCLHHSQNLLRAVSNMLQKARQTL | |
| | EFYPCTSEEIDHEDITKDKTSTVEACLPLELTKNESSLNSRETSFITNGSCL | |
| | ASRKTSFMMALCLSSIYEDLKMYQVEFKTMNAKLLMDPKRQIFLDQNMLAVI | |
| | DELMQALNFNSETVPQKSSLEEPDFYKTKIKLCILLHAFRIRAVTIDRVMSY | |
| | LNAS | |

P36693671

| | | |
|---|---|---|
| Chain 1 | QVQLVQSGAEVKKPGASVKVSCKASGYTFTMNIIHWVRQAPGQGLEWMGWIH | 153 |
| | PGSGAIKYAQKLQGRVTMTTDTSTSTAYMELRSLRSDDTAVYYCARHGGTGR | |
| | GAMDYWGQGTLVTVSSASTKGPSVFPLAPSSKSTSGGTAALGCLVKDYFPEP | |
| | VTVSWNSGALTSGVHTFPAVLQSSGLYSLSSVVTVPSSSLGTQTYICNVNHK | |
| | PSNTKVDKKVEPKSCDKGGGGSSGRSDNRGGGGSIWELKKDVYVVELDWYPD | |
| | APGEMVVLTCDTPEEDGITWTLDQSSEVLGSGKTLTIQVKEFGDAGQYTCHK | |
| | GGEVLSHSLLLLHKKEDGIWSTDILKDQKEPKNKTFLRCEAKNYSGRFTCWW | |
| | LTTISTDLTFSVKSSRGSSDPQGVTCGAATLSAERVRGDNKEYEYSVECQED | |
| | SAAPAAEESLPIEVMVDAVHKLKYENYTSSFFIRDIIKPDPPKNLQLKPLKN | |
| | SRQVEVSWEYPDTWSTPHSYFSLTFSVQVQGQDQDEKKDRVFTDKTSATVIC | |
| | RKNASISVRAQDRYYSSSWSEWASVPCS | |
| Chain 2 | EIVLTQSPGTLSLSPGERATLSCRASQSVSTSAYSYMHWYQQKPGQAPRLLI | 154 |
| | YLASNLESGIPDRFSGSGSGTDFTLTISRLEPEDFAVYYCQQSRELPYTEGQ | |
| | GTKLEIKRTVAAPSVFIFPPSDEQLKSGTASVVCLLNNFYPREAKVQWKVDN | |
| | ALQSGNSQESVTEQDSKDSTYSLSSTLTLSKADYEKHKVYACEVTHQGLSSP | |
| | VTKSFNRGECGGGGSPLGLAGRNLPVATPDPGMFPCLHHSQNLLRAVSNMLQ | |
| | KARQTLEFYPCTSEEIDHEDITKDKTSTVEACLPLELTKNESSLNSRETSFI | |
| | TNGSCLASRKTSFMMALCLSSIYEDLKMYQVEFKTMNAKLLMDPKRQIFLDQ | |
| | NMLAVIDELMQALNFNSETVPQKSSLEEPDFYKTKIKLCILLHAFRIRAVTI | |
| | DRVMSYLNAS | |

P37103712

| | | |
|---|---|---|
| Chain 1 | QVQLVQSGAEVKKPGSSVKVSCKTSGDTFSTYAISWVRQAPGQGLEWMGGII | 155 |
| | PIFGKAHYAQKFQGRVTITADESTSTAYMELSSLRSEDTAVYFCARKFHFVS | |
| | GSPFGMDVWGQGTTVTVSSASTKGPSVFPLAPSSKSTSGGTAALGCLVKDYF | |
| | PEPVTVSWNSGALTSGVHTFPAVLQSSGLYSLSSVVTVPSSSLGTQTYICNV | |
| | NHKPSNTKVDKKVEPKSCDKGGGGSSGRSDNRGGGGSIWELKKDVYVVELDW | |
| | YPDAPGEMVVLTCDTPEEDGITWTLDQSSEVLGSGKTLTIQVKEFGDAGQYT | |
| | CHKGGEVLSHSLLLLHKKEDGIWSTDILKDQKEPKNKTFLRCEAKNYSGRFT | |
| | CWWLTTISTDLTFSVKSSRGSSDPQGVTCGAATLSAERVRGDNKEYEYSVEC | |
| | QEDSAAPAAEESLPIEVMVDAVHKLKYENYTSSFFIRDIIKPDPPKNLQLKP | |
| | LKNSRQVEVSWEYPDTWSTPHSYFSLTFSVQVQGQDQDEKKDRVFTDKTSAT | |
| | VICRKNASISVRAQDRYYSSSWSEWASVPCS | |
| Chain 2 | EIVLTQSPATLSLSPGERATLSCRASQSVSSYLAWYQQKPGQAPRLLIYDAS | 156 |
| | NRATGIPARFSGSGSGTDFTLTISSLEPEDFAVYYCQQRSNWPTFGQGTKVE | |
| | IKRTVAAPSVFIFPPSDEQLKSGTASVVCLLNNFYPREAKVQWKVDNALQSG | |
| | NSQESVTEQDSKDSTYSLSSTLTLSKADYEKHKVYACEVTHQGLSSPVTKSF | |
| | NRGECGGGGSRNLPVATPDPGMFPCLHHSQNLLRAVSNMLQKARQTLEFYPC | |
| | TSEEIDHEDITKDKTSTVEACLPLELTKNESSLNSRETSFITNGSCLASRKT | |
| | SFMMALCLSSIYEDLKMYQVEFKTMNAKLLMDPKRQIFLDQNMLAVIDELMQ | |
| | ALNFNSETVPQKSSLEEPDFYKTKIKLCILLHAFRIRAVTIDRVMSYLNAS | |

P37113712

| | | |
|---|---|---|
| Chain 1 | QVQLVQSGAEVKKPGSSVKVSCKTSGDTFSTYAISWVRQAPGQGLEWMGGII | 157 |
| | PIFGKAHYAQKFQGRVTITADESTSTAYMELSSLRSEDTAVYFCARKFHFVS | |
| | GSPFGMDVWGQGTTVTVSSASTKGPSVFPLAPSSKSTSGGTAALGCLVKDYF | |
| | PEPVTVSWNSGALTSGVHTFPAVLQSSGLYSLSSVVTVPSSSLGTQTYICNV | |
| | NHKPSNTKVDKKVEPKSCDKGGSPLGLAGLSGRSDNRGGGGSIWELKKDVYV | |
| | VELDWYPDAPGEMVVLTCDTPEEDGITWTLDQSSEVLGSGKTLTIQVKEFGD | |
| | AGQYTCHKGGEVLSHSLLLLHKKEDGIWSTDILKDQKEPKNKTFLRCEAKNY | |
| | SGRFTCWWLTTISTDLTFSVKSSRGSSDPQGVTCGAATLSAERVRGDNKEYE | |
| | YSVECQEDSAAPAAEESLPIEVMVDAVHKLKYENYTSSFFIRDIIKPDPPKN | |
| | LQLKPLKNSRQVEVSWEYPDTWSTPHSYFSLTFSVQVQGQDQDEKKDRVFTD | |
| | KTSATVICRKNASISVRAQDRYYSSSWSEWASVPCS | |
| Chain 2 | EIVLTQSPATLSLSPGERATLSCRASQSVSSYLAWYQQKPGQAPRLLIYDAS | 158 |
| | NRATGIPARFSGSGSGTDFTLTISSLEPEDFAVYYCQQRSNWPTFGQGTKVE | |
| | IKRTVAAPSVFIFPPSDEQLKSGTASVVCLLNNFYPREAKVQWKVDNALQSG | |
| | NSQESVTEQDSKDSTYSLSSTLTLSKADYEKHKVYACEVTHQGLSSPVTKSF | |
| | NRGECGGGGSRNLPVATPDPGMFPCLHHSQNLLRAVSNMLQKARQTLEFYPC | |
| | TSEEIDHEDITKDKTSTVEACLPLELTKNESSLNSRETSFITNGSCLASRKT | |
| | SFMMALCLSSIYEDLKMYQVEFKTMNAKLLMDPKRQIFLDQNMLAVIDELMQ | |
| | ALNFNSETVPQKSSLEEPDFYKTKIKLCILLHAFRIRAVTIDRVMSYLNAS | |

P37133715

| | | |
|---|---|---|
| Chain 1 | QVQLVQSGSELKKPGASVKVSCKASGYTFTNYDINWVRQAPGQGLEWMGWIF | 159 |
| | PGDESTQYNEKFKGRFVFSLDTSVSTAYLQISSLKAEDTAVYYCARQTTGTW | |
| | FAYWGQGTLVTVSASTKGPSVFPLAPSSKSTSGGTAALGCLVKDYFPEPVTV | |
| | SWNSGALTSGVHTFPAVLQSSGLYSLSSVVTVPSSSLGTQTYICNVNHKPSN | |
| | TKVDKKVEPKSCDKGGGGSSGRSDNRGGGGSIWELKKDVYVVELDWYPDAPG | |
| | EMVVLTCDTPEEDGITWTLDQSSEVLGSGKTLTIQVKEFGDAGQYTCHKGGE | |
| | VLSHSLLLLHKKEDGIWSTDILKDQKEPKNKTFLRCEAKNYSGRFTCWWLTT | |
| | ISTDLTFSVKSSRGSSDPQGVTCGAATLSAERVRGDNKEYEYSVECQEDSAA | |
| | PAAEESLPIEVMVDAVHKLKYENYTSSFFIRDIIKPDPPKNLQLKPLKNSRQ | |
| | VEVSWEYPDTWSTPHSYFSLTFSVQVQGQDQDEKKDRVFTDKTSATVICRKN | |
| | ASISVRAQDRYYSSSWSEWASVPCS | |
| Chain 2 | DVVMTQSPAFLSVTPGEKVTITCRASQSISDYLYWYQQKPDQAPKLLIKYAS | 160 |
| | QSISGIPARFSGSGSGTDFTFTISSLEAEDAATYYCQNGHSFPLTFGQGTKL | |
| | ELKRTVAAPSVFIFPPSDEQLKSGTASVVCLLNNFYPREAKVQWKVDNALQS | |
| | GNSQESVTEQDSKDSTYSLSSTLTLSKADYEKHKVYACEVTHQGLSSPVTKS | |
| | FNRGECGGGGSRNLPVATPDPGMFPCLHHSQNLLRAVSNMLQKARQTLEFYP | |
| | CTSEEIDHEDITKDKTSTVEACLPLELTKNESSLNSRETSFITNGSCLASRK | |
| | TSFMMALCLSSIYEDLKMYQVEFKTMNAKLLMDPKRQIFLDQNMLAVIDELM | |
| | QALNFNSETVPQKSSLEEPDFYKTKIKLCILLHAFRIRAVTIDRVMSYLNAS | |

P37143715

| | | |
|---|---|---|
| Chain 1 | QVQLVQSGSELKKPGASVKVSCKASGYTFTNYDINWVRQAPGQGLEWMGWIF | 161 |
| | PGDESTQYNEKFKGRFVFSLDTSVSTAYLQISSLKAEDTAVYYCARQTTGTW | |
| | FAYWGQGTLVTVSASTKGPSVFPLAPSSKSTSGGTAALGCLVKDYFPEPVTV | |
| | SWNSGALTSGVHTFPAVLQSSGLYSLSSVVTVPSSSLGTQTYICNVNHKPSN | |
| | TKVDKKVEPKSCDKGGSPLGLAGLSGRSDNRGGGGSIWELKKDVYVVELDWY | |
| | PDAPGEMVVLTCDTPEEDGITWTLDQSSEVLGSGKTLTIQVKEFGDAGQYTC | |
| | HKGGEVLSHSLLLLHKKEDGIWSTDILKDQKEPKNKTFLRCEAKNYSGRFTC | |
| | WWLTTISTDLTFSVKSSRGSSDPQGVTCGAATLSAERVRGDNKEYEYSVECQ | |
| | EDSAAPAAEESLPIEVMVDAVHKLKYENYTSSFFIRDIIKPDPPKNLQLKPL | |
| | KNSRQVEVSWEYPDTWSTPHSYFSLTFSVQVQGQDQDEKKDRVFTDKTSATV | |
| | ICRKNASISVRAQDRYYSSSWSEWASVPCS | |
| Chain 2 | DVVMTQSPAFLSVTPGEKVTITCRASQSISDYLYWYQQKPDQAPKLLIKYAS | 162 |
| | QSISGIPARFSGSGSGTDFTFTISSLEAEDAATYYCQNGHSFPLTFGQGTKL | |
| | ELKRTVAAPSVFIFPPSDEQLKSGTASVVCLLNNFYPREAKVQWKVDNALQS | |
| | GNSQESVTEQDSKDSTYSLSSTLTLSKADYEKHKVYACEVTHQGLSSPVTKS | |
| | FNRGECGGGGSRNLPVATPDPGMFPCLHHSQNLLRAVSNMLQKARQTLEFYP | |
| | CTSEEIDHEDITKDKTSTVEACLPLELTKNESSLNSRETSFITNGSCLASRK | |
| | TSFMMALCLSSIYEDLKMYQVEFKTMNAKLLMDPKRQIFLDQNMLAVIDELM | |
| | QALNFNSETVPQKSSLEEPDFYKTKIKLCILLHAFRIRAVTIDRVMSYLNAS | |

P37163717

| | | |
|---|---|---|
| Chain 1 | QVQLVQSGSELKKPGASVKVSCKASGYTFTNYDINWVRQAPGQGLEWMGWIF | 163 |
| | PGDESTQYNEKFKGRFVFSLDTSVSTAYLQISSLKAEDTAVYYCARQTTGTW | |
| | FAYWGQGTLVTVSASTKGPSVFPLAPSSKSTSGGTAALGCLVKDYFPEPVTV | |
| | SWNSGALTSGVHTFPAVLQSSGLYSLSSVVTVPSSSLGTQTYICNVNHKPSN | |
| | TKVDKKVEPKSCDKESKYGPPCPPCPAPEFLGGPSVFLFPPKPKDTLMISRT | |
| | PEVTCVVVDVSQEDPEVQFNWYVDGVEVHNAKTKPREEQFNSTYRVVSVLTV | |
| | LHQDWLNGKEYKCKVSNKGLPSSIEKTISKAKGQPREPQVYTLPPCQEEMTK | |
| | NQVSLWCLVKGFYPSDIAVEWESNGQPENNYKTTPPVLDSDGSFFLYSRLTV | |
| | DKSRWQEGNVFSCSVMHEALHNHYTQKSLSLSLGGGGGSLSGRSDNRGGGGS | |
| | IWELKKDVYVVELDWYPDAPGEMVVLTCDTPEEDGITWTLDQSSEVLGSGKT | |
| | LTIQVKEFGDAGQYTCHKGGEVLSHSLLLLHKKEDGIWSTDILKDQKEPKNK | |
| | TFLRCEAKNYSGRFTCWWLTTISTDLTFSVKSSRGSSDPQGVTCGAATLSAE | |
| | RVRGDNKEYEYSVECQEDSAAPAAEESLPIEVMVDAVHKLKYENYTSSFFIR | |
| | DIIKPDPPKNLQLKPLKNSRQVEVSWEYPDTWSTPHSYFSLTFSVQVQGQDQ | |
| | DEKKDRVFTDKTSATVICRKNASISVRAQDRYYSSSWSEWASVPCS | |
| Chain 2 | DVVMTQSPAFLSVTPGEKVTITCRASQSISDYLYWYQQKPDQAPKLLIKYAS | 164 |
| | QSISGIPARFSGSGSGTDFTFTISSLEAEDAATYYCQNGHSFPLTFGQGTKL | |
| | ELKRTVAAPSVFIFPPSDEQLKSGTASVVCLLNNFYPREAKVQWKVDNALQS | |
| | GNSQESVTEQDSKDSTYSLSSTLTLSKADYEKHKVYACEVTHQGLSSPVTKS | |
| | FNRGECESKYGPPCPPCPAPEFLGGPSVFLFPPKPKDTLMISRTPEVTCVVV | |
| | DVSQEDPEVQFNWYVDGVEVHNAKTKPREEQFNSTYRVVSVLTVLHQDWLNG | |
| | KEYKCKVSNKGLPSSIEKTISKAKGQPREPQVCTLPPSQEEMTKNQVSLSCA | |
| | VKGFYPSDIAVEWESNGQPENNYKTTPPVLDSDGSFFLVSRLTVDKSRWQEG | |
| | NVFSCSVMHEALHNHYTQKSLSLSLGGGGGSRNLPVATPDPGMFPCLHHSQN | |
| | LLRAVSNMLQKARQTLEFYPCTSEEIDHEDITKDKTSTVEACLPLELTKNES | |
| | SLNSRETSFITNGSCLASRKTSFMMALCLSSIYEDLKMYQVEFKTMNAKLLM | |
| | DPKRQIFLDQNMLAVIDELMQALNFNSETVPQKSSLEEPDFYKTKIKLCILL | |
| | HAFRIRAVTIDRVMSYLNAS | |

P37403715

| | | |
|---|---|---|
| Chain 1 | QVQLVQSGSELKKPGASVKVSCKASGYTFTNYDINWVRQAPGQGLEWMGWIF | 165 |
| | PGDESTQYNEKFKGRFVFSLDTSVSTAYLQISSLKAEDTAVYYCARQTTGTW | |
| | FAYWGQGTLVTVSASTKGPSVFPLAPSSKSTSGGTAALGCLVKDYFPEPVTV | |
| | SWNSGALTSGVHTFPAVLQSSGLYSLSSVVTVPSSSLGTQTYICNVNHKPSN | |
| | TKVDKKVEPKSCDKGGGGSSGRSDNRGGGGSIWELKKDVYVVELDWYPDAPG | |
| | EMVVLTCDTPEEDGITWTLDQSSEVLGSGKTLTIQVKEFGDAGQYTCHKGGE | |
| | VLSHSLLLLHKKEDGIWSTDILKDQKEPKNKTFLRCEAKNYSGRFTCWWLTT | |
| | ISTDLTFSVKSSRGSSDPQGVTCGAATLSAERVRGDNKEYEYSVECQEDSAA | |
| | PAAEESLPIEVMVDAVHKLKYENYTSSFFIRDIIKPDPPKNLQLKPLKNSRQ | |
| | VEVSWEYPDTWSTPHSYFSLTFSVQVQGKSKREKKDRVFTDKTSATVICRKN | |
| | ASISVRAQDRYYSSSWSEWASVPCS | |
| Chain 2 | DVVMTQSPAFLSVTPGEKVTITCRASQSISDYLYWYQQKPDQAPKLLIKYAS | 166 |
| | QSISGIPARFSGSGSGTDFTFTISSLEAEDAATYYCQNGHSFPLTFGQGTKL | |
| | ELKRTVAAPSVFIFPPSDEQLKSGTASVVCLLNNFYPREAKVQWKVDNALQS | |
| | GNSQESVTEQDSKDSTYSLSSTLTLSKADYEKHKVYACEVTHQGLSSPVTKS | |
| | FNRGECGGGGSRNLPVATPDPGMFPCLHHSQNLLRAVSNMLQKARQTLEFYP | |
| | CTSEEIDHEDITKDKTSTVEACLPLELTKNESSLNSRETSFITNGSCLASRK | |
| | TSFMMALCLSSIYEDLKMYQVEFKTMNAKLLMDPKRQIFLDQNMLAVIDELM | |
| | QALNFNSETVPQKSSLEEPDFYKTKIKLCILLHAFRIRAVTIDRVMSYLNAS | |

P37413715

| | | |
|---|---|---|
| Chain 1 | QVQLVQSGSELKKPGASVKVSCKASGYTFTNYDINWVRQAPGQGLEWMGWIF | 167 |
| | PGDESTQYNEKFKGRFVFSLDTSVSTAYLQISSLKAEDTAVYYCARQTTGTW | |
| | FAYWGQGTLVTVSASTKGPSVFPLAPSSKSTSGGTAALGCLVKDYFPEPVTV | |
| | SWNSGALTSGVHTFPAVLQSSGLYSLSSVVTVPSSSLGTQTYICNVNHKPSN | |
| | TKVDKKVEPKSCDKGGSPLGLAGLSGRSDNRGGGGSIWELKKDVYVVELDWY | |
| | PDAPGEMVVLTCDTPEEDGITWTLDQSSEVLGSGKTLTIQVKEFGDAGQYTC | |
| | HKGGEVLSHSLLLLHKKEDGIWSTDILKDQKEPKNKTFLRCEAKNYSGRFTC | |
| | WWLTTISTDLTFSVKSSRGSSDPQGVTCGAATLSAERVRGDNKEYEYSVECQ | |
| | EDSAAPAAEESLPIEVMVDAVHKLKYENYTSSFFIRDIIKPDPPKNLQLKPL | |
| | KNSRQVEVSWEYPDTWSTPHSYFSLTFSVQVQGKSKREKKDRVFTDKTSATV | |
| | ICRKNASISVRAQDRYYSSSWSEWASVPCS | |
| Chain 2 | DVVMTQSPAFLSVTPGEKVTITCRASQSISDYLYWYQQKPDQAPKLLIKYAS | 168 |
| | QSISGIPARFSGSGSGTDFTFTISSLEAEDAATYYCQNGHSFPLTFGQGTKL | |
| | ELKRTVAAPSVFIFPPSDEQLKSGTASVVCLLNNFYPREAKVQWKVDNALQS | |
| | GNSQESVTEQDSKDSTYSLSSTLTLSKADYEKHKVYACEVTHQGLSSPVTKS | |
| | FNRGECGGGGSRNLPVATPDPGMFPCLHHSQNLLRAVSNMLQKARQTLEFYP | |
| | CTSEEIDHEDITKDKTSTVEACLPLELTKNESSLNSRETSFITNGSCLASRK | |
| | TSFMMALCLSSIYEDLKMYQVEFKTMNAKLLMDPKRQIFLDQNMLAVIDELM | |
| | QALNFNSETVPQKSSLEEPDFYKTKIKLCILLHAFRIRAVTIDRVMSYLNAS | |

P37423717

| | | |
|---|---|---|
| Chain 1 | QVQLVQSGSELKKPGASVKVSCKASGYTFTNYDINWVRQAPGQGLEWMGWIF | 169 |
| | PGDESTQYNEKFKGRFVFSLDTSVSTAYLQISSLKAEDTAVYYCARQTTGTW | |
| | FAYWGQGTLVTVSASTKGPSVFPLAPSSKSTSGGTAALGCLVKDYFPEPVTV | |
| | SWNSGALTSGVHTFPAVLQSSGLYSLSSVVTVPSSSLGTQTYICNVNHKPSN | |
| | TKVDKKVEPKSCDKESKYGPPCPPCPAPEFLGGPSVFLFPPKPKDTLMISRT | |
| | PEVTCVVVDVSQEDPEVQFNWYVDGVEVHNAKTKPREEQFNSTYRVVSVLTV | |
| | LHQDWLNGKEYKCKVSNKGLPSSIEKTISKAKGQPREPQVYTLPPCQEEMTK | |
| | NQVSLWCLVKGFYPSDIAVEWESNGQPENNYKTTPPVLDSDGSFFLYSRLTV | |
| | DKSRWQEGNVFSCSVMHEALHNHYTQKSLSLSLGGGGGSLSGRSDNRGGGGS | |
| | IWELKKDVYVVELDWYPDAPGEMVVLTCDTPEEDGITWTLDQSSEVLGSGKT | |
| | LTIQVKEFGDAGQYTCHKGGEVLSHSLLLLHKKEDGIWSTDILKDQKEPKNK | |
| | TFLRCEAKNYSGRFTCWWLTTISTDLTFSVKSSRGSSDPQGVTCGAATLSAE | |
| | RVRGDNKEYEYSVECQEDSAAPAAEESLPIEVMVDAVHKLKYENYTSSFFIR | |
| | DIIKPDPPKNLQLKPLKNSRQVEVSWEYPDTWSTPHSYFSLTFSVQVQGKSK | |
| | REKKDRVFTDKTSATVICRKNASISVRAQDRYYSSSWSEWASVPCS | |
| Chain 2 | DVVMTQSPAFLSVTPGEKVTITCRASQSISDYLYWYQQKPDQAPKLLIKYAS | 170 |
| | QSISGIPARFSGSGSGTDFTFTISSLEAEDAATYYCQNGHSFPLTFGQGTKL | |
| | ELKRTVAAPSVFIFPPSDEQLKSGTASVVCLLNNFYPREAKVQWKVDNALQS | |
| | GNSQESVTEQDSKDSTYSLSSTLTLSKADYEKHKVYACEVTHQGLSSPVTKS | |
| | FNRGECESKYGPPCPPCPAPEFLGGPSVFLFPPKPKDTLMISRTPEVTCVVV | |
| | DVSQEDPEVQFNWYVDGVEVHNAKTKPREEQFNSTYRVVSVLTVLHQDWLNG | |
| | KEYKCKVSNKGLPSSIEKTISKAKGQPREPQVCTLPPSQEEMTKNQVSLSCA | |
| | VKGFYPSDIAVEWESNGQPENNYKTTPPVLDSDGSFFLVSRLTVDKSRWQEG | |
| | NVFSCSVMHEALHNHYTQKSLSLSLGGGGGSRNLPVATPDPGMFPCLHHSQN | |
| | LLRAVSNMLQKARQTLEFYPCTSEEIDHEDITKDKTSTVEACLPLELTKNES | |
| | SLNSRETSFITNGSCLASRKTSFMMALCLSSIYEDLKMYQVEFKTMNAKLLM | |
| | DPKRQIFLDQNMLAVIDELMQALNFNSETVPQKSSLEEPDFYKTKIKLCILL | |
| | HAFRIRAVTIDRVMSYLNAS | |

P37433717

| | | |
|---|---|---|
| Chain 1 | QVQLVQSGSELKKPGASVKVSCKASGYTFTNYDINWVRQAPGQGLEWMGWIF | 171 |
| | PGDESTQYNEKFKGRFVFSLDTSVSTAYLQISSLKAEDTAVYYCARQTTGTW | |
| | FAYWGQGTLVTVSASTKGPSVFPLAPSSKSTSGGTAALGCLVKDYFPEPVTV | |
| | SWNSGALTSGVHTFPAVLQSSGLYSLSSVVTVPSSSLGTQTYICNVNHKPSN | |
| | TKVDKKVEPKSCDKESKYGPPCPPCPAPEFLGGPSVFLFPPKPKDTLMISRT | |
| | PEVTCVVVDVSQEDPEVQFNWYVDGVEVHNAKTKPREEQFNSTYRVVSVLTV | |
| | LHQDWLNGKEYKCKVSNKGLPSSIEKTISKAKGQPREPQVYTLPPCQEEMTK | |
| | NQVSLWCLVKGFYPSDIAVEWESNGQPENNYKTTPPVLDSDGSFFLYSRLTV | |
| | DKSRWQEGNVFSCSVMHEALHNHYTQKSLSLSLGGGSPLGLAGLSGRSDNRG | |
| | GGGSIWELKKDVYVVELDWYPDAPGEMVVLTCDTPEEDGITWTLDQSSEVLG | |
| | SGKTLTIQVKEFGDAGQYTCHKGGEVLSHSLLLLHKKEDGIWSTDILKDQKE | |
| | PKNKTFLRCEAKNYSGRFTCWWLTTISTDLTFSVKSSRGSSDPQGVTCGAAT | |
| | LSAERVRGDNKEYEYSVECQEDSAAPAAEESLPIEVMVDAVHKLKYENYTSS | |
| | FFIRDIIKPDPPKNLQLKPLKNSRQVEVSWEYPDTWSTPHSYFSLTFSVQVQ | |
| | GKSKREKKDRVFTDKTSATVICRKNASISVRAQDRYYSSSWSEWASVPCS | |
| Chain 2 | DVVMTQSPAFLSVTPGEKVTITCRASQSISDYLYWYQQKPDQAPKLLIKYAS | 172 |
| | QSISGIPARFSGSGSGTDFTFTISSLEAEDAATYYCQNGHSFPLTFGQGTKL | |
| | ELKRTVAAPSVFIFPPSDEQLKSGTASVVCLLNNFYPREAKVQWKVDNALQS | |
| | GNSQESVTEQDSKDSTYSLSSTLTLSKADYEKHKVYACEVTHQGLSSPVTKS | |
| | FNRGECESKYGPPCPPCPAPEFLGGPSVFLFPPKPKDTLMISRTPEVTCVVV | |
| | DVSQEDPEVQFNWYVDGVEVHNAKTKPREEQFNSTYRVVSVLTVLHQDWLNG | |
| | KEYKCKVSNKGLPSSIEKTISKAKGQPREPQVCTLPPSQEEMTKNQVSLSCA | |
| | VKGFYPSDIAVEWESNGQPENNYKTTPPVLDSDGSFFLVSRLTVDKSRWQEG | |
| | NVFSCSVMHEALHNHYTQKSLSLSLGGGGGSRNLPVATPDPGMFPCLHHSQN | |
| | LLRAVSNMLQKARQTLEFYPCTSEEIDHEDITKDKTSTVEACLPLELTKNES | |
| | SLNSRETSFITNGSCLASRKTSFMMALCLSSIYEDLKMYQVEFKTMNAKLLM | |
| | DPKRQIFLDQNMLAVIDELMQALNFNSETVPQKSSLEEPDFYKTKIKLCILL | |
| | HAFRIRAVTIDRVMSYLNAS | |

P37633717

| | | |
|---|---|---|
| Chain 1 | QVQLVQSGSELKKPGASVKVSCKASGYTFTNYDINWVRQAPGQGLEWMGWIF | 173 |
| | PGDESTQYNEKFKGRFVFSLDTSVSTAYLQISSLKAEDTAVYYCARQTTGTW | |
| | FAYWGQGTLVTVSASTKGPSVFPLAPSSKSTSGGTAALGCLVKDYFPEPVTV | |
| | SWNSGALTSGVHTFPAVLQSSGLYSLSSVVTVPSSSLGTQTYICNVNHKPSN | |
| | TKVDKKVEPKSCDKESKYGPPCPPCPAPEFLGGPSVFLFPPKPKDTLMISRT | |
| | PEVTCVVVDVSQEDPEVQFNWYVDGVEVHNAKTKPREEQFNSTYRVVSVLTV | |
| | LHQDWLNGKEYKCKVSNKGLPSSIEKTISKAKGQPREPQVYTLPPCQEEMTK | |
| | NQVSLWCLVKGFYPSDIAVEWESNGQPENNYKTTPPVLDSDGSFFLYSRLTV | |
| | DKSRWQEGNVFSCSVMHEALHNHYTQKSLSLSLGGGGGSIWELKKDVYVVEL | |
| | DWYPDAPGEMVVLTCDTPEEDGITWTLDQSSEVLGSGKTLTIQVKEFGDAGQ | |
| | YTCHKGGEVLSHSLLLLHKKEDGIWSTDILKDQKEPKNKTFLRCEAKNYSGR | |
| | FTCWWLTTISTDLTFSVKSSRGSSDPQGVTCGAATLSAERVRGDNKEYEYSV | |
| | ECQEDSAAPAAEESLPIEVMVDAVHKLKYENYTSSFFIRDIIKPDPPKNLQL | |
| | KPLKNSRQVEVSWEYPDTWSTPHSYFSLTFSVQVQGQDQDEKKDRVFTDKTS | |
| | ATVICRKNASISVRAQDRYYSSSWSEWASVPCS | |
| Chain 2 | DVVMTQSPAFLSVTPGEKVTITCRASQSISDYLYWYQQKPDQAPKLLIKYAS | 174 |
| | QSISGIPARFSGSGSGTDFTFTISSLEAEDAATYYCQNGHSFPLTFGQGTKL | |
| | ELKRTVAAPSVFIFPPSDEQLKSGTASVVCLLNNFYPREAKVQWKVDNALQS | |
| | GNSQESVTEQDSKDSTYSLSSTLTLSKADYEKHKVYACEVTHQGLSSPVTKS | |
| | FNRGECESKYGPPCPPCPAPEFLGGPSVFLFPPKPKDTLMISRTPEVTCVVV | |
| | DVSQEDPEVQFNWYVDGVEVHNAKTKPREEQFNSTYRVVSVLTVLHQDWLNG | |
| | KEYKCKVSNKGLPSSIEKTISKAKGQPREPQVCTLPPSQEEMTKNQVSLSCA | |
| | VKGFYPSDIAVEWESNGQPENNYKTTPPVLDSDGSFFLVSRLTVDKSRWQEG | |
| | NVFSCSVMHEALHNHYTQKSLSLSLGGGGGSRNLPVATPDPGMFPCLHHSQN | |
| | LLRAVSNMLQKARQTLEFYPCTSEEIDHEDITKDKTSTVEACLPLELTKNES | |
| | SLNSRETSFITNGSCLASRKTSFMMALCLSSIYEDLKMYQVEFKTMNAKLLM | |
| | DPKRQIFLDQNMLAVIDELMQALNFNSETVPQKSSLEEPDFYKTKIKLCILL | |
| | HAFRIRAVTIDRVMSYLNAS | |

P37643717

| | | |
|---|---|---|
| Chain 1 | QVQLVQSGSELKKPGASVKVSCKASGYTFTNYDINWVRQAPGQGLEWMGWIF | 175 |
| | PGDESTQYNEKFKGRFVFSLDTSVSTAYLQISSLKAEDTAVYYCARQTTGTW | |
| | FAYWGQGTLVTVSASTKGPSVFPLAPSSKSTSGGTAALGCLVKDYFPEPVTV | |
| | SWNSGALTSGVHTFPAVLQSSGLYSLSSVVTVPSSSLGTQTYICNVNHKPSN | |
| | TKVDKKVEPKSCDKESKYGPPCPPCPAPEFLGGPSVFLFPPKPKDTLMISRT | |
| | PEVTCVVVDVSQEDPEVQFNWYVDGVEVHNAKTKPREEQFNSTYRVVSVLTV | |
| | LHQDWLNGKEYKCKVSNKGLPSSIEKTISKAKGQPREPQVYTLPPCQEEMTK | |
| | NQVSLWCLVKGFYPSDIAVEWESNGQPENNYKTTPPVLDSDGSFFLYSRLTV | |
| | DKSRWQEGNVFSCSVMHEALHNHYTQKSLSLSLGGGGGSIWELKKDVYVVEL | |
| | DWYPDAPGEMVVLTCDTPEEDGITWTLDQSSEVLGSGKTLTIQVKEFGDAGQ | |
| | YTCHKGGEVLSHSLLLLHKKEDGIWSTDILKDQKEPKNKTFLRCEAKNYSGR | |
| | FTCWWLTTISTDLTFSVKSSRGSSDPQGVTCGAATLSAERVRGDNKEYEYSV | |
| | ECQEDSAAPAAEESLPIEVMVDAVHKLKYENYTSSFFIRDIIKPDPPKNLQL | |
| | KPLKNSRQVEVSWEYPDTWSTPHSYFSLTFSVQVQGKSKREKKDRVFTDKTS | |
| | ATVICRKNASISVRAQDRYYSSSWSEWASVPCS | |
| Chain 2 | DVVMTQSPAFLSVTPGEKVTITCRASQSISDYLYWYQQKPDQAPKLLIKYAS | 176 |
| | QSISGIPARFSGSGSGTDFTFTISSLEAEDAATYYCQNGHSFPLTFGQGTKL | |
| | ELKRTVAAPSVFIFPPSDEQLKSGTASVVCLLNNFYPREAKVQWKVDNALQS | |
| | GNSQESVTEQDSKDSTYSLSSTLTLSKADYEKHKVYACEVTHQGLSSPVTKS | |
| | FNRGECESKYGPPCPPCPAPEFLGGPSVFLFPPKPKDTLMISRTPEVTCVVV | |
| | DVSQEDPEVQFNWYVDGVEVHNAKTKPREEQFNSTYRVVSVLTVLHQDWLNG | |
| | KEYKCKVSNKGLPSSIEKTISKAKGQPREPQVCTLPPSQEEMTKNQVSLSCA | |
| | VKGFYPSDIAVEWESNGQPENNYKTTPPVLDSDGSFFLVSRLTVDKSRWQEG | |
| | NVFSCSVMHEALHNHYTQKSLSLSLGGGGGSRNLPVATPDPGMFPCLHHSQN | |
| | LLRAVSNMLQKARQTLEFYPCTSEEIDHEDITKDKTSTVEACLPLELTKNES | |
| | SLNSRETSFITNGSCLASRKTSFMMALCLSSIYEDLKMYQVEFKTMNAKLLM | |
| | DPKRQIFLDQNMLAVIDELMQALNFNSETVPQKSSLEEPDFYKTKIKLCILL | |
| | HAFRIRAVTIDRVMSYLNAS | |

P38143816

| | | |
|---|---|---|
| Chain 1 | QVQLVQSGSELKKPGASVKVSCKASGYTFTNYDINWVRQAPGQGLEWMGWIF | 177 |
| | PGDE STQYNEKFKGRFVFSLDTSVSTAYLQISSLKAEDTAVYYCARQTTA | |
| | TWFAYWGQGTLVTVSASTKGPSVFPLAPSSKSTSGGTAALGCLVKDYFPEPV | |
| | TVSWNSGALTSGVHTFPAVLQSSGLYSLSSVVTVPSSSLGTQTYICNVNHKP | |
| | SNTKVDKKVEPKSCDKGGSPLGLAGLSGRSDNRGGGGSIWELKKDVYVVELD | |
| | WYPDAPGEMVVLTCDTPEEDGITWTLDQSSEVLGSGKTLTIQVKEFGDAGQY | |
| | TCHKGGEVLSHSLLLLHKKEDGIWSTDILKDQKEPKNKTFLRCEAKNYSGRF | |
| | TCWWLTTISTDLTFSVKSSRGSSDPQGVTCGAATLSAERVRGDNKEYEYSVE | |
| | CQEDSAAPAAEESLPIEVMVDAVHKLKYENYTSSFFIRDIIKPDPPKNLQLK | |
| | PLKNSRQVEVSWEYPDTWSTPHSYFSLTFSVQVQGQDQDEKKDRVFTDKTSA | |
| | TVICRKNASISVRAQDRYYSSSWSEWASVPCS | |
| Chain 2 | DVVMTQSPAFLSVTPGEKVTITCRASQSISDYLHWYQQKPDQAPKLLIKYAS | 178 |
| | QSISGIPARFSGSGSGTDFTFTISSLEAEDAATYYCQNGHSFPLTFGQGTKL | |
| | ELKRTVAAPSVFIFPPSDEQLKSGTASVVCLLNNFYPREAKVQWKVDNALQS | |
| | GNSQESVTEQDSKDSTYSLSSTLTLSKADYEKHKVYACEVTHQGLSSPVTKS | |
| | FNRGECGGGGSGGGGSGGGGSRNLPVATPDPGMFPCLHHSQNLLRAVSNMLQ | |
| | KARQTLEFYPCTSEEIDHEDITKDKTSTVEACLPLELTKNESSLNSRETSFI | |
| | TNGSCLASRKTSFMMALCLSSIYEDLKMYQVEFKTMNAKLLMDPKRQIFLDQ | |
| | NMLAVIDELMQALNFNSETVPQKSSLEEPDFYKTKIKLCILLHAFRIRAVTI | |
| | DRVMSYLNAS | |

P38153816

| | | |
|---|---|---|
| Chain 1 | QVQLVQSGSELKKPGASVKVSCKASGYTFTNYDINWVRQAPGQGLEWMGWIF | 179 |
| | PGDESTQYNEKFKGRFVFSLDTSVSTAYLQISSLKAEDTAVYYCARQTTATW | |
| | FAYWGQGTLVTVSASTKGPSVFPLAPSSKSTSGGTAALGCLVKDYFPEPVTV | |
| | SWNSGALTSGVHTFPAVLQSSGLYSLSSVVTVPSSSLGTQTYICNVNHKPSN | |
| | TKVDKKVEPKSCDKGGGGSGGGGSGGGGSGGGGSGGGGSIWELKKDVYVVEL | |
| | DWYPDAPGEMVVLTCDTPEEDGITWTLDQSSEVLGSGKTLTIQVKEFGDAGQ | |
| | YTCHKGGEVLSHSLLLLHKKEDGIWSTDILKDQKEPKNKTFLRCEAKNYSGR | |
| | FTCWWLTTISTDLTFSVKSSRGSSDPQGVTCGAATLSAERVRGDNKEYEYSV | |
| | ECQEDSAAPAAEESLPIEVMVDAVHKLKYENYTSSFFIRDIIKPDPPKNLQL | |
| | KPLKNSRQVEVSWEYPDTWSTPHSYFSLTFSVQVQGQDQDEKKDRVFTDKTS | |
| | ATVICRKNASISVRAQDRYYSSSWSEWASVPCS | |
| Chain 2 | DVVMTQSPAFLSVTPGEKVTITCRASQSISDYLHWYQQKPDQAPKLLIKYAS | 180 |
| | QSISGIPARFSGSGSGTDFTFTISSLEAEDAATYYCQNGHSFPLTFGQGTKL | |
| | ELKRTVAAPSVFIFPPSDEQLKSGTASVVCLLNNFYPREAKVQWKVDNALQS | |
| | GNSQESVTEQDSKDSTYSLSSTLTLSKADYEKHKVYACEVTHQGLSSPVTKS | |
| | FNRGECGGGGSGGGGSGGGGSRNLPVATPDPGMFPCLHHSQNLLRAVSNMLQ | |
| | KARQTLEFYPCTSEEIDHEDITKDKTSTVEACLPLELTKNESSLNSRETSFI | |
| | TNGSCLASRKTSFMMALCLSSIYEDLKMYQVEFKTMNAKLLMDPKRQIFLDQ | |
| | NMLAVIDELMQALNFNSETVPQKSSLEEPDFYKTKIKLCILLHAFRIRAVTI | |
| | DRVMSYLNAS | |

P38173819

| | | |
|---|---|---|
| Chain 1 | QVQLVQSGSELKKPGASVKVSCKASGYTFTNYDINWVRQAPGQGLEWMGWIF | 181 |
| | PGDESTQYNEKFKGRFVFSLDTSVSTAYLQISSLKAEDTAVYYCARQTTATW | |
| | FAYWGQGTLVTVSASTKGPSVFPLAPSSKSTSGGTAALGCLVKDYFPEPVTV | |
| | SWNSGALTSGVHTFPAVLQSSGLYSLSSVVTVPSSSLGTQTYICNVNHKPSN | |
| | TKVDKKVEPKSCDKGGSPLGLAGLSGRSDNRGGGGSIWELKKDVYVVELDWY | |
| | PDAPGEMVVLTCDTPEEDGITWTLDQSSEVLGSGKTLTIQVKEFGDAGQYTC | |
| | HKGGEVLSHSLLLLHKKEDGIWSTDILKDQKEPKNKTFLRCEAKNYSGRFTC | |
| | WWLTTISTDLTFSVKSSRGSSDPQGVTCGAATLSAERVRGDNKEYEYSVECQ | |
| | EDSACPAAEESLPIEVMVDAVHKLKYENYTSSFFIRDIIKPDPPKNLQLKPL | |
| | KNSRQVEVSWEYPDTWSTPHSYFSLTFSVQVQGKSKREKKDRVFTDKTSATV | |
| | ICRKNASISVRAQDRYYSSSWSEWASVPCS | |
| Chain 2 | DVVMTQSPAFLSVTPGEKVTITCRASQSISDYLHWYQQKPDQAPKLLIKYAS | 182 |
| | QSISGIPARFSGSGSGTDFTFTISSLEAEDAATYYCQNGHSFPLTFGQGTKL | |
| | ELKRTVAAPSVFIFPPSDEQLKSGTASVVCLLNNFYPREAKVQWKVDNALQS | |
| | GNSQESVTEQDSKDSTYSLSSTLTLSKADYEKHKVYACEVTHQGLSSPVTKS | |
| | FNRGECGGGGSGGGGSGGGGSRNLPVATPDPGMFPCLHHSQNLLRAVSNMLQ | |
| | KARQTLEFYPCTSEEIDHEDITKDKTSTVEACLPLELTKNESCLNSRETSFI | |
| | TNGSCLASRKTSFMMALCLSSIYEDLKMYQVEFKTMNAKLLMDPKRQIFLDQ | |
| | NMLAVIDELMQALNFNSETVPQKSSLEEPDFYKTKIKLCILLHAFRIRAVTI | |
| | DRVMSYLNAS | |

P38183819

| | | |
|---|---|---|
| Chain 1 | QVQLVQSGSELKKPGASVKVSCKASGYTFTNYDINWVRQAPGQGLEWMGWIF | 183 |
| | PGDESTQYNEKFKGRFVFSLDTSVSTAYLQISSLKAEDTAVYYCARQTTATW | |
| | FAYWGQGTLVTVSASTKGPSVFPLAPSSKSTSGGTAALGCLVKDYFPEPVTV | |
| | SWNSGALTSGVHTFPAVLQSSGLYSLSSVVTVPSSSLGTQTYICNVNHKPSN | |
| | TKVDKKVEPKSCDKGGGGSGGGGSGGGGSGGGGSGGGGSIWELKKDVYVVEL | |
| | DWYPDAPGEMVVLTCDTPEEDGITWTLDQSSEVLGSGKTLTIQVKEFGDAGQ | |
| | YTCHKGGEVLSHSLLLLHKKEDGIWSTDILKDQKEPKNKTFLRCEAKNYSGR | |
| | FTCWWLTTISTDLTFSVKSSRGSSDPQGVTCGAATLSAERVRGDNKEYEYSV | |
| | ECQEDSACPAAEESLPIEVMVDAVHKLKYENYTSSFFIRDIIKPDPPKNLQL | |
| | KPLKNSRQVEVSWEYPDTWSTPHSYFSLTFSVQVQGKSKREKKDRVFTDKTS | |
| | ATVICRKNASISVRAQDRYYSSSWSEWASVPCS | |
| Chain 2 | DVVMTQSPAFLSVTPGEKVTITCRASQSISDYLHWYQQKPDQAPKLLIKYAS | 184 |
| | QSISGIPARFSGSGSGTDFTFTISSLEAEDAATYYCQNGHSFPLTFGQGTKL | |
| | ELKRTVAAPSVFIFPPSDEQLKSGTASVVCLLNNFYPREAKVQWKVDNALQS | |
| | GNSQESVTEQDSKDSTYSLSSTLTLSKADYEKHKVYACEVTHQGLSSPVTKS | |
| | FNRGECGGGGSGGGGSGGGGSRNLPVATPDPGMFPCLHHSQNLLRAVSNMLQ | |
| | KARQTLEFYPCTSEEIDHEDITKDKTSTVEACLPLELTKNESCLNSRETSFI | |
| | TNGSCLASRKTSFMMALCLSSIYEDLKMYQVEFKTMNAKLLMDPKRQIFLDQ | |
| | NMLAVIDELMQALNFNSETVPQKSSLEEPDFYKTKIKLCILLHAFRIRAVTI | |
| | DRVMSYLNAS | |

P39043906

| | | |
|---|---|---|
| Chain 1 | QVQLVQSGAEVKKPGASVKVSCKASGYTFTMNIIHWVRQAPGQGLEWMGWIH | 185 |
| | PGSGAIKYAQKLQGRVTMTTDTSTSTAYMELRSLRSDDTAVYYCARHGGTGR | |
| | GAMDYWGQGTLVTVSSASTKGPSVFPLAPSSKSTSGGTAALGCLVKDYFPEP | |
| | VTVSWNSGALTSGVHTFPAVLQSSGLYSLSSVVTVPSSSLGTQTYICNVNHK | |
| | PSNTKVDKKVEPKSCDKGGGGSSGRSDNRGGGGSIWELKKDVYVVELDWYPD | |
| | APGEMVVLTCDTPEEDGITWTLDQSSEVLGSGKTLTIQVKEFGDAGQYTCHK | |
| | GGEVLSHSLLLLHKKEDGIWSTDILKDQKEPKNKTFLRCEAKNYSGRFTCWW | |
| | LTTISTDLTFSVKSSRGSSDPQGVTCGAATLSAERVRGDNKEYEYSVECQED | |
| | SACPAAEESLPIEVMVDAVHKLKYENYTSSFFIRDIIKPDPPKNLQLKPLKN | |
| | SRQVEVSWEYPDTWSTPHSYFSLTFSVQVQGQDQDEKKDRVFTDKTSATVIC | |
| | RKNASISVRAQDRYYSSSWSEWASVPCS | |
| Chain 2 | EIVLTQSPGTLSLSPGERATLSCRASQSVSTSAYSYMHWYQQKPGQAPRLLI | 186 |
| | YLASNLESGIPDRFSGSGSGTDFTLTISRLEPEDFAVYYCQQSRELPYTEGQ | |
| | GTKLEIKRTVAAPSVFIFPPSDEQLKSGTASVVCLLNNFYPREAKVQWKVDN | |
| | ALQSGNSQESVTEQDSKDSTYSLSSTLTLSKADYEKHKVYACEVTHQGLSSP | |
| | VTKSFNRGECGGGGSPLGLAGRNLPVATPDPGMFPCLHHSQNLLRAVSNMLQ | |
| | KARQTLEFYPCTSEEIDHEDITKDKTSTVEACLPLELTKNESCLNSRETSFI | |
| | TNGSCLASRKTSFMMALCLSSIYEDLKMYQVEFKTMNAKLLMDPKRQIFLDQ | |
| | NMLAVIDELMQALNFNSETVPQKSSLEEPDFYKTKIKLCILLHAFRIRAVTI | |
| | DRVMSYLNAS | |

P39043907

| | | |
|---|---|---|
| Chain 1 | QVQLVQSGAEVKKPGASVKVSCKASGYTFTMNIIHWVRQAPGQGLEWMGWIH | 187 |
| | PGSGAIKYAQKLQGRVTMTTDTSTSTAYMELRSLRSDDTAVYYCARHGGTGR | |
| | GAMDYWGQGTLVTVSSASTKGPSVFPLAPSSKSTSGGTAALGCLVKDYFPEP | |
| | VTVSWNSGALTSGVHTFPAVLQSSGLYSLSSVVTVPSSSLGTQTYICNVNHK | |
| | PSNTKVDKKVEPKSCDKGGGGSSGRSDNRGGGGSIWELKKDVYVVELDWYPD | |
| | APGEMVVLTCDTPEEDGITWTLDQSSEVLGSGKTLTIQVKEFGDAGQYTCHK | |
| | GGEVLSHSLLLLHKKEDGIWSTDILKDQKEPKNKTFLRCEAKNYSGRFTCWW | |
| | LTTISTDLTFSVKSSRGSSDPQGVTCGAATLSAERVRGDNKEYEYSVECQED | |
| | SACPAAEESLPIEVMVDAVHKLKYENYTSSFFIRDIIKPDPPKNLQLKPLKN | |
| | SRQVEVSWEYPDTWSTPHSYFSLTFSVQVQGQDQDEKKDRVFTDKTSATVIC | |
| | RKNASISVRAQDRYYSSSWSEWASVPCS | |
| Chain 2 | EVQLVESGGGLVQPGNSLRLSCAASGFTFSSFGMSWVRQAPGKGLEWVSSIS | 188 |
| | GSGSDTLYADSVKGRFTISRDNAKTTLYLQMNSLRPEDTAVYYCTIGGSLSR | |
| | SSQGTLVTVSSEIVLTQSPGTLSLSPGERATLSCRASQSVSTSAYSYMHWYQ | |
| | QKPGQAPRLLIYLASNLESGIPDRFSGSGSGTDFTLTISRLEPEDFAVYYCQ | |
| | QSRELPYTFGQGTKLEIKRTVAAPSVFIFPPSDEQLKSGTASVVCLLNNFYP | |
| | REAKVQWKVDNALQSGNSQESVTEQDSKDSTYSLSSTLTLSKADYEKHKVYA | |
| | CEVTHQGLSSPVTKSFNRGECGGGGSPLGLAGRNLPVATPDPGMFPCLHHSQ | |
| | NLLRAVSNMLQKARQTLEFYPCTSEEIDHEDITKDKTSTVEACLPLELTKNE | |
| | SCLNSRETSFITNGSCLASRKTSFMMALCLSSIYEDLKMYQVEFKTMNAKLL | |
| | MDPKRQIFLDQNMLAVIDELMQALNFNSETVPQKSSLEEPDFYKTKIKLCIL | |
| | LHAFRIRAVTIDRVMSYLNAS | |

P39053906

| | | |
|---|---|---|
| Chain 1 | QVQLVQSGAEVKKPGASVKVSCKASGYTFTMNIIHWVRQAPGQGLEWMGWIH | 189 |
| | PGSGAIKYAQKLQGRVTMTTDTSTSTAYMELRSLRSDDTAVYYCARHGGTGR | |
| | GAMDYWGQGTLVTVSSASTKGPSVFPLAPSSKSTSGGTAALGCLVKDYFPEP | |
| | VTVSWNSGALTSGVHTFPAVLQSSGLYSLSSVVTVPSSSLGTQTYICNVNHK | |
| | PSNTKVDKKVEPKSCDKGGGGSSGRSDNRGGGGSIWELKKDVYVVELDWYPD | |
| | APGEMVVLTCDTPEEDGITWTLDQSSEVLGSGKTLTIQVKEFGDAGQYTCHK | |
| | GGEVLSHSLLLLHKKEDGIWSTDILKDQKEPKNKTFLRCEAKNYSGRFTCWW | |
| | LTTISTDLTFSVKSSRGSSDPQGVTCGAATLSAERVRGDNKEYEYSVECQED | |
| | SACPAAEESLPIEVMVDAVHKLKYENYTSSFFIRDIIKPDPPKNLQLKPLKN | |
| | SRQVEVSWEYPDTWSTPHSYFSLTFSVQVQGKSKREKKDRVFTDKTSATVIC | |
| | RKNASISVRAQDRYYSSSWSEWASVPCS | |
| Chain 2 | EIVLTQSPGTLSLSPGERATLSCRASQSVSTSAYSYMHWYQQKPGQAPRLLI | 190 |
| | YLASNLESGIPDRESGSGSGTDFTLTISRLEPEDFAVYYCQQSRELPYTFGQ | |
| | GTKLEIKRTVAAPSVFIFPPSDEQLKSGTASVVCLLNNFYPREAKVQWKVDN | |
| | ALQSGNSQESVTEQDSKDSTYSLSSTLTLSKADYEKHKVYACEVTHQGLSSP | |
| | VTKSFNRGECGGGGSPLGLAGRNLPVATPDPGMFPCLHHSQNLLRAVSNMLQ | |
| | KARQTLEFYPCTSEEIDHEDITKDKTSTVEACLPLELTKNESCLNSRETSFI | |
| | TNGSCLASRKTSFMMALCLSSIYEDLKMYQVEFKTMNAKLLMDPKRQIFLDQ | |
| | NMLAVIDELMQALNFNSETVPQKSSLEEPDFYKTKIKLCILLHAFRIRAVTI | |
| | DRVMSYLNAS | |

P39053907

| | | |
|---|---|---|
| Chain 1 | QVQLVQSGAEVKKPGASVKVSCKASGYTFTMNIIHWVRQAPGQGLEWMGWIH | 191 |
| | PGSGAIKYAQKLQGRVTMTTDTSTSTAYMELRSLRSDDTAVYYCARHGGTGR | |
| | GAMDYWGQGTLVTVSSASTKGPSVFPLAPSSKSTSGGTAALGCLVKDYFPEP | |
| | VTVSWNSGALTSGVHTFPAVLQSSGLYSLSSVVTVPSSSLGTQTYICNVNHK | |
| | PSNTKVDKKVEPKSCDKGGGGSSGRSDNRGGGGSIWELKKDVYVVELDWYPD | |
| | APGEMVVLTCDTPEEDGITWTLDQSSEVLGSGKTLTIQVKEFGDAGQYTCHK | |
| | GGEVLSHSLLLLHKKEDGIWSTDILKDQKEPKNKTFLRCEAKNYSGRFTCWW | |
| | LTTISTDLTFSVKSSRGSSDPQGVTCGAATLSAERVRGDNKEYEYSVECQED | |
| | SACPAAEESLPIEVMVDAVHKLKYENYTSSFFIRDIIKPDPPKNLQLKPLKN | |
| | SRQVEVSWEYPDTWSTPHSYFSLTFSVQVQGKSKREKKDRVFTDKTSATVIC | |
| | RKNASISVRAQDRYYSSSWSEWASVPCS | |
| Chain 2 | EVQLVESGGGLVQPGNSLRLSCAASGFTFSSFGMSWVRQAPGKGLEWVSSIS | 192 |
| | GSGSDTLYADSVKGRFTISRDNAKTTLYLQMNSLRPEDTAVYYCTIGGSLSR | |
| | SSQGTLVTVSSEIVLTQSPGTLSLSPGERATLSCRASQSVSTSAYSYMHWYQ | |
| | QKPGQAPRLLIYLASNLESGIPDRFSGSGSGTDFTLTISRLEPEDFAVYYCQ | |
| | QSRELPYTFGQGTKLEIKRTVAAPSVFIFPPSDEQLKSGTASVVCLLNNFYP | |
| | REAKVQWKVDNALQSGNSQESVTEQDSKDSTYSLSSTLTLSKADYEKHKVYA | |
| | CEVTHQGLSSPVTKSFNRGECGGGGSPLGLAGRNLPVATPDPGMFPCLHHSQ | |
| | NLLRAVSNMLQKARQTLEFYPCTSEEIDHEDITKDKTSTVEACLPLELTKNE | |
| | SCLNSRETSFITNGSCLASRKTSFMMALCLSSIYEDLKMYQVEFKTMNAKLL | |
| | MDPKRQIFLDQNMLAVIDELMQALNFNSETVPQKSSLEEPDFYKTKIKLCIL | |
| | LHAFRIRAVTIDRVMSYLNAS | |

P40453671

| | | |
|---|---|---|
| Chain 1 | QVQLVQSGAEVKKPGASVKVSCKASGYTFTMNIIHWVRQAPGQGLEWMGWIH | 193 |
| | PGSGAIKYAQKLQGRVTMTTDTSTSTAYMELRSLRSDDTAVYYCARHGGTGR | |
| | GAMDYWGQGTLVTVSSASTKGPSVFPLAPSSKSTSGGTAALGCLVKDYFPEP | |
| | VTVSWNSGALTSGVHTFPAVLQSSGLYSLSSVVTVPSSSLGTQTYICNVNHK | |
| | PSNTKVDKKVEPKSCDKGGGGSSGRSDNRGGGGSIWELKKDVYVVELDWYPD | |
| | APGEMVVLTCDTPEEDGITWTLDQSSEVLGSGKTLTIQVKEFGDAGQYTCHK | |
| | GGEVLSHSLLLLHKKEDGIWSTDILKDQKEPKNKTFLRCEAKNYSGRFTCWW | |
| | LTTISTDLTFSVKSSRGSSDPQGVTCGAATLSAERVRGDNKEYEYSVECQED | |
| | SAAPAAEESLPIEVMVDAVHKLKYENYTSSFFIRDIIKPDPPKNLQLKPLKN | |
| | SRQVEVSWEYPDTWSTPHSYFSLTFSVQVQGQDQDEKKDRVFTDKTSATVIC | |
| | RKNASISVRAQDRYYSSSWSEWASVPCSGGGGSGGGGSDAHKSEVAHRFKDL | |
| | GEENFKALVLIAFAQYLQQCPFEDHVKLVNEVTEFAKTCVADESAENCDKSL | |
| | HTLFGDKLCTVATLRETYGEMADCCAKQEPERNECFLQHKDDNPNLPRLVRP | |
| | EVDVMCTAFHDNEETFLKKYLYEIARRHPYFYAPELLFFAKRYKAAFTECCQ | |
| | AADKAACLLPKLDELRDEGKASSAKQRLKCASLQKFGERAFKAWAVARLSQR | |
| | FPKAEFAEVSKLVTDLTKVHTECCHGDLLECADDRADLAKYICENQDSISSK | |
| | LKECCEKPLLEKSHCIAEVENDEMPADLPSLAADFVESKDVCKNYAEAKDVE | |
| | LGMFLYEYARRHPDYSVVLLLRLAKTYETTLEKCCAAADPHECYAKVEDEFK | |
| | PLVEEPQNLIKQNCELFEQLGEYKFQNALLVRYTKKVPQVSTPTLVEVSRNL | |
| | GKVGSKCCKHPEAKRMPCAEDYLSVVLNQLCVLHEKTPVSDRVTKCCTESLV | |
| | NRRPCFSALEVDETYVPKEFNAETFTFHADICTLSEKERQIKKQTALVELVK | |
| | HKPKATKEQLKAVMDDFAAFVEKCCKADDKETCFAEEGKKLVAASQAALGL | |
| Chain 2 | EIVLTQSPGTLSLSPGERATLSCRASQSVSTSAYSYMHWYQQKPGQAPRLLI | 194 |
| | YLASNLESGIPDRFSGSGSGTDFTLTISRLEPEDFAVYYCQQSRELPYTFGQ | |
| | GTKLEIKRTVAAPSVFIFPPSDEQLKSGTASVVCLLNNFYPREAKVQWKVDN | |
| | ALQSGNSQESVTEQDSKDSTYSLSSTLTLSKADYEKHKVYACEVTHQGLSSP | |
| | VTKSFNRGECGGGGSPLGLAGRNLPVATPDPGMFPCLHHSQNLLRAVSNMLQ | |
| | KARQTLEFYPCTSEEIDHEDITKDKTSTVEACLPLELTKNESSLNSRETSFI | |
| | TNGSCLASRKTSFMMALCLSSIYEDLKMYQVEFKTMNAKLLMDPKRQIFLDQ | |
| | NMLAVIDELMQALNFNSETVPQKSSLEEPDFYKTKIKLCILLHAFRIRAVTI | |
| | DRVMSYLNAS | |

P40463712

| | | |
|---|---|---|
| Chain 1 | QVQLVQSGAEVKKPGSSVKVSCKTSGDTFSTYAISWVRQAPGQGLEWMGGII | 195 |
| | PIFGKAHYAQKFQGRVTITADESTSTAYMELSSLRSEDTAVYFCARKFHFVS | |
| | GSPFGMDVWGQGTTVTVSSASTKGPSVFPLAPSSKSTSGGTAALGCLVKDYF | |
| | PEPVTVSWNSGALTSGVHTFPAVLQSSGLYSLSSVVTVPSSSLGTQTYICNV | |
| | NHKPSNTKVDKKVEPKSCDKGGSPLGLAGLSGRSDNRGGGGSIWELKKDVYV | |
| | VELDWYPDAPGEMVVLTCDTPEEDGITWTLDQSSEVLGSGKTLTIQVKEFGD | |
| | AGQYTCHKGGEVLSHSLLLLHKKEDGIWSTDILKDQKEPKNKTFLRCEAKNY | |
| | SGRFTCWWLTTISTDLTFSVKSSRGSSDPQGVTCGAATLSAERVRGDNKEYE | |
| | YSVECQEDSAAPAAEESLPIEVMVDAVHKLKYENYTSSFFIRDIIKPDPPKN | |
| | LQLKPLKNSRQVEVSWEYPDTWSTPHSYFSLTFSVQVQGQDQDEKKDRVFTD | |
| | KTSATVICRKNASISVRAQDRYYSSSWSEWASVPCSGGGGSGGGGSDAHKSE | |
| | VAHRFKDLGEENFKALVLIAFAQYLQQCPFEDHVKLVNEVTEFAKTCVADES | |
| | AENCDKSLHTLFGDKLCTVATLRETYGEMADCCAKQEPERNECFLQHKDDNP | |
| | NLPRLVRPEVDVMCTAFHDNEETFLKKYLYEIARRHPYFYAPELLFFAKRYK | |
| | AAFTECCQAADKAACLLPKLDELRDEGKASSAKQRLKCASLQKFGERAFKAW | |
| | AVARLSQRFPKAEFAEVSKLVTDLTKVHTECCHGDLLECADDRADLAKYICE | |
| | NQDSISSKLKECCEKPLLEKSHCIAEVENDEMPADLPSLAADFVESKDVCKN | |
| | YAEAKDVFLGMFLYEYARRHPDYSVVLLLRLAKTYETTLEKCCAAADPHECY | |
| | AKVFDEFKPLVEEPQNLIKQNCELFEQLGEYKFQNALLVRYTKKVPQVSTPT | |
| | LVEVSRNLGKVGSKCCKHPEAKRMPCAEDYLSVVLNQLCVLHEKTPVSDRVT | |
| | KCCTESLVNRRPCFSALEVDETYVPKEFNAETFTFHADICTLSEKERQIKKQ | |
| | TALVELVKHKPKATKEQLKAVMDDFAAFVEKCCKADDKETCFAEEGKKLVAA | |
| | SQAALGL | |
| Chain 2 | EIVLTQSPATLSLSPGERATLSCRASQSVSSYLAWYQQKPGQAPRLLIYDAS | 196 |
| | NRATGIPARFSGSGSGTDFTLTISSLEPEDFAVYYCQQRSNWPTFGQGTKVE | |
| | IKRTVAAPSVFIFPPSDEQLKSGTASVVCLLNNFYPREAKVQWKVDNALQSG | |
| | NSQESVTEQDSKDSTYSLSSTLTLSKADYEKHKVYACEVTHQGLSSPVTKSF | |
| | NRGECGGGGSRNLPVATPDPGMFPCLHHSQNLLRAVSNMLQKARQTLEFYPC | |
| | TSEEIDHEDITKDKTSTVEACLPLELTKNESSLNSRETSFITNGSCLASRKT | |
| | SFMMALCLSSIYEDLKMYQVEFKTMNAKLLMDPKRQIFLDQNMLAVIDELMQ | |
| | ALNENSETVPQKSSLEEPDFYKTKIKLCILLHAFRIRAVTIDRVMSYLNAS | |

P40473715

| | | |
|---|---|---|
| Chain 1 | QVQLVQSGSELKKPGASVKVSCKASGYTFTNYDINWVRQAPGQGLEWMGWIF | 197 |
| | PGDESTQYNEKFKGRFVESLDTSVSTAYLQISSLKAEDTAVYYCARQTTGTW | |
| | FAYWGQGTLVTVSASTKGPSVFPLAPSSKSTSGGTAALGCLVKDYFPEPVTV | |
| | SWNSGALTSGVHTFPAVLQSSGLYSLSSVVTVPSSSLGTQTYICNVNHKPSN | |
| | TKVDKKVEPKSCDKGGSPLGLAGLSGRSDNRGGGGSIWELKKDVYVVELDWY | |
| | PDAPGEMVVLTCDTPEEDGITWTLDQSSEVLGSGKTLTIQVKEFGDAGQYTC | |
| | HKGGEVLSHSLLLLHKKEDGIWSTDILKDQKEPKNKTFLRCEAKNYSGRFTC | |
| | WWLTTISTDLTFSVKSSRGSSDPQGVTCGAATLSAERVRGDNKEYEYSVECQ | |
| | EDSAAPAAEESLPIEVMVDAVHKLKYENYTSSFFIRDIIKPDPPKNLQLKPL | |
| | KNSRQVEVSWEYPDTWSTPHSYFSLTFSVQVQGQDQDEKKDRVFTDKTSATV | |
| | ICRKNASISVRAQDRYYSSSWSEWASVPCSGGGGSGGGGSDAHKSEVAHRFK | |
| | DLGEENFKALVLIAFAQYLQQCPFEDHVKLVNEVTEFAKTCVADESAENCDK | |
| | SLHTLFGDKLCTVATLRETYGEMADCCAKQEPERNECFLQHKDDNPNLPRLV | |
| | RPEVDVMCTAFHDNEETFLKKYLYEIARRHPYFYAPELLFFAKRYKAAFTEC | |
| | CQAADKAACLLPKLDELRDEGKASSAKQRLKCASLQKFGERAFKAWAVARLS | |
| | QRFPKAEFAEVSKLVTDLTKVHTECCHGDLLECADDRADLAKYICENQDSIS | |
| | SKLKECCEKPLLEKSHCIAEVENDEMPADLPSLAADFVESKDVCKNYAEAKD | |
| | VFLGMFLYEYARRHPDYSVVLLLRLAKTYETTLEKCCAAADPHECYAKVEDE | |
| | FKPLVEEPQNLIKQNCELFEQLGEYKFQNALLVRYTKKVPQVSTPTLVEVSR | |
| | NLGKVGSKCCKHPEAKRMPCAEDYLSVVLNQLCVLHEKTPVSDRVTKCCTES | |
| | LVNRRPCFSALEVDETYVPKEFNAETFTFHADICTLSEKERQIKKQTALVEL | |
| | VKHKPKATKEQLKAVMDDFAAFVEKCCKADDKETCFAEEGKKLVAASQAALG | |
| | L | |
| Chain 2 | DVVMTQSPAFLSVTPGEKVTITCRASQSISDYLYWYQQKPDQAPKLLIKYAS | 198 |
| | QSISGIPARFSGSGSGTDFTFTISSLEAEDAATYYCQNGHSFPLTFGQGTKL | |
| | ELKRTVAAPSVFIFPPSDEQLKSGTASVVCLLNNFYPREAKVQWKVDNALQS | |
| | GNSQESVTEQDSKDSTYSLSSTLTLSKADYEKHKVYACEVTHQGLSSPVTKS | |
| | FNRGECGGGGSRNLPVATPDPGMFPCLHHSQNLLRAVSNMLQKARQTLEFYP | |
| | CTSEEIDHEDITKDKTSTVEACLPLELTKNESSLNSRETSFITNGSCLASRK | |
| | TSFMMALCLSSIYEDLKMYQVEFKTMNAKLLMDPKRQIFLDQNMLAVIDELM | |
| | QALNFNSETVPQKSSLEEPDFYKTKIKLCILLHAFRIRAVTIDRVMSYLNAS | |

[0191] Thus, in certain embodiments, the first polypeptide (or chain 1) comprises, consists, or consists essentially of an amino acid sequence that is at least 80, 85, 90, 95, 98, or 100% identical to a sequence selected from Table S4, and the second polypeptide (or chain 2) comprises, consists, or consists essentially of a corresponding amino acid sequence that is at least 80, 85, 90, 95, 98, or 100% identical to a sequence selected from Table S4. In certain embodiments, as indicated, the heterodimer comprises, consists, or consists essentially of a chain 3 amino acid sequence that is at least 80, 85, 90, 95, 98, or 100% identical to a chain 3 sequence selected from Table S4.

Human IL-12A (p35) Protein Variants

[0192] Certain embodiments include an isolated human IL-12A (p35) protein variant, which comprises, consists, or consists essentially of an amino acid sequence that is at least 80, 85, 90, 95, 98, or 100% identical to the amino acid sequence set forth in SEQ ID NO: 1 or 2, and which has an amino acid substitution at any one or more of E38, F39, P41, C74, K128, F166, Y167, S197, and/or D188, as defined by the mature p35 sequence. In some embodiments, the isolated human p35 protein variant has an amino acid substitution selected from any one or more of:
[0193] E38A, E38D, E38F, E38G, E38H, E38I, E38K, E38L, E38M, E38N, E38P, E38Q, E38R, E38S, E38T, E38V, or E38W;
[0194] F39A, F39D, F39E, F39G, F39H, F39I, F39K, F39L, F39M, F39N, F39P, F39Q, F39R, F39S, F39T, F39V, or F39W;
[0195] P41A, P41D, P41E, P41F, P41G, P41H, P41I, P41K, P41L, P41M, P41N, P41Q, P41R, P41S, P41T, P41V, or P41W;
[0196] C74A or C74S;
[0197] K128A, K128D, K128E, K128F, K128G, K128H, K128I, K128L, K128M, K128N, K128P, K128Q, K128R, K128S, K128T, K128V, or K128W;
[0198] F166A, F166D, F166E, F166G, F166H, F166I, F166K, F166L, F166M, F166N, F166P, F166Q, F166R, F166S, F166T, F166V, or F166W
[0199] S197A; and
[0200] D188A, including any combination of the foregoing. In some embodiments, the isolated p35 protein variant has reduced binding affinity to wild-type IL-12Rβ31/IL-12Rβ2 receptor complex of about or at least about 2-fold, 5-fold, 10-fold, 50-fold, 100-fold, 1000-fold or more, relative to the binding affinity of the wild-type p35 sequence.

[0201] The p35 protein variants can used, for example, as standalone, isolated proteins, as part of IL-12 complexes in combination with IL-12B(p40) proteins, or as part of fusion proteins or other complexes. The p35 protein variants can be used in any of the methods or compositions described herein, including any one or more of the attenuated protein homodimers or heterodimers described herein.

### Methods of Use and Pharmaceutical Compositions

[0202] Certain embodiments include methods of treating, ameliorating the symptoms of, and/or reducing the progression of, a disease or condition in a subject in need thereof, comprising administering to the subject at least one attenuated protein homodimer or heterodimer, as described herein, or an IL-12A (p35) protein variant, as described herein. Also included are methods of enhancing an immune response in a subject comprising administering to the subject at least one attenuated protein homodimer or heterodimer, as described herein, or an IL-12A protein variant, as described herein. In particular embodiments, the disease is selected from one or more of a cancer, a viral infection, and an immune disorder.

[0203] In some embodiments, following administration, the attenuated protein homodimer or heterodimer is “activated” through binding of the ABD to the cell surface protein, plasma protein, or ECM protein, which increases binding (avidity) of the IL-12 protein(s) in the homodimer or heterodimer to the IL-12Rβ1/IL-12Rβ2 receptor complex on the surface of the immune cell in vitro or in vivo, and thereby increases at least one IL-12 signaling activity of the homodimer or heterodimer. In particular embodiments, the activation occurs in a cancer cell or cancer tissue, or a virally-infected cell or virally-infected tissue.

[0204] Typically, the activated homodimer or heterodimer protein has at least one immune-stimulating IL-12 signaling activity, for example, by binding to the IL-12Rβ1/IL-12Rβ2 receptor complex on the surface of an immune cell in vivo, and thereby stimulating the immune cell. Exemplary IL-12 signaling activities include stimulating growth and function of T cells, enhancing cytotoxic activity of NK cells and/or CD8+ T cells, stimulating production of interferon-γ (IFN-γ) and/or tumor necrosis factor-α (TNF-α), and inhibiting angiogenesis.

[0205] In particular embodiments, the immune cell is selected from one or more of a T cell, a B cell, a natural killer cell, a monocyte, and a macrophage. In some embodiments, the immune cell is an exhausted T cell or an exhausted NK cell. An “exhausted” cell refers to an immune cell that is immunologically dysfunctional despite repeated exposure to antigens. In some instances, “exhaustion” is defined by poor effector function, sustained expression of inhibitory receptors, and for T cells a transcriptional state distinct from that of functional effector or memory T cells (see, for example, Wherry, Nature Immunol. 12:492-499, 2011; and Beltra et al., Immunity. 52:825-841, 2020). Certain exhausted T cells co-express multiple co-inhibitory receptors (for example, PD-1, CTLA-4, LAG-3, TIGIT, CD39, TIM-3), which dampen T-cell activation by various mechanisms.

[0206] In some embodiments, administration and activation of the attenuated protein homodimer or heterodimer increases an immune response in the subject by about or at least about 5, 10, 15, 20, 25, 30, 35, 40, 45, 50, 60, 70, 80, 90, 100, 200, 300, 400, 500, 600, 700, 800, 900, 1000, 2000% or more, relative to a control. In some instances, the immune response is an anti-cancer or anti-viral immune response. In some embodiments, administration and activation of the attenuated protein homodimer or heterodimer increases cell-killing in the subject by about or at least about 5, 10, 15, 20, 25, 30, 35, 40, 45, 50, 60, 70, 80, 90, 100, 200, 300, 400, 500, 600, 700, 800, 900, 1000, 2000% or more, relative to a control. In some embodiments, wherein the cell-killing is cancer cell-killing or virally-infected cell-killing.

[0207] In some embodiments, the disease is a cancer, that is, the subject in need thereof has or is suspected of having a cancer. Certain embodiments thus include methods of treating, ameliorating the symptoms of, or inhibiting the progression of, a cancer in a subject in need thereof, comprising administering to the subject at least one attenuated protein homodimer or heterodimer, as described herein. In particular embodiments, the cancer is a primary cancer or a metastatic cancer. In specific embodiments, the cancer is selected from one or more of melanoma (optionally metastatic melanoma), kidney cancer (optionally renal cell carcinoma), pancreatic cancer, bone cancer, prostate cancer, small cell lung cancer, non-small cell lung cancer (NSCLC), mesothelioma, leukemia (optionally lymphocytic leukemia, chronic myelogenous leukemia, acute myeloid leukemia, or relapsed acute myeloid leukemia), multiple myeloma, lymphoma, hepatoma (hepatocellular carcinoma), sarcoma, B-cell malignancy, breast cancer, ovarian cancer, colorectal cancer, glioma, glioblastoma multiforme, meningioma, pituitary adenoma, vestibular schwannoma, primary CNS lymphoma, primitive neuroectodermal tumor (medulloblastoma), bladder cancer, uterine cancer, esophageal cancer, brain cancer, head and neck cancers, cervical cancer, testicular cancer, thyroid cancer, and stomach cancer

[0208] In some embodiments, as noted above, the cancer is a metastatic cancer. Further to the above cancers, exemplary metastatic cancers include, without limitation, bladder cancers which have metastasized to the bone, liver, and/or lungs; breast cancers which have metastasized to the bone, brain, liver, and/or lungs; colorectal cancers which have metastasized to the liver, lungs, and/or peritoneum; kidney cancers which have metastasized to the adrenal glands, bone, brain, liver, and/or lungs; lung cancers which have metastasized to the adrenal glands, bone, brain, liver, and/or other lung sites; melanomas which have metastasized to the bone, brain, liver, lung, and/or skin/muscle; ovarian cancers which have metastasized to the liver, lung, and/or peritoneum; pancreatic cancers which have metastasized to the liver, lung, and/or peritoneum; prostate cancers which have metastasized to the adrenal glands, bone, liver, and/or lungs; stomach cancers which have metastasized to the liver, lung, and/or peritoneum; thyroid cancers which have metastasized to the bone, liver, and/or lungs; and uterine cancers which have metastasized to the bone, liver, lung, peritoneum, and/or vagina; among others.

[0209] The methods for treating cancers can be combined with other therapeutic modalities. For example, a combination therapy described herein can be administered to a subject before, during, or after other therapeutic interventions, including symptomatic care, radiotherapy, surgery, transplantation, hormone therapy, photodynamic therapy, antibiotic therapy, or any combination thereof. Symptomatic care includes administration of corticosteroids, to reduce cerebral edema, headaches, cognitive dysfunction, and emesis, and administration of anti-convulsants, to reduce seizures. Radiotherapy includes whole-brain irradiation, fractionated radiotherapy, and radiosurgery, such as stereotactic radiosurgery, which can be further combined with traditional surgery.

[0210] Certain embodiments thus include combination therapies for treating cancers, including methods of treating ameliorating the symptoms of, or inhibiting the progression of, a cancer in a subject in need thereof, comprising administering to the subject at least one attenuated protein homodimer or heterodimer, as described herein, in combination with at least one additional agent, for example, a chemotherapeutic agent, a hormonal therapeutic agent, and/or a kinase inhibitor. In some embodiments, administering the at least one attenuated protein homodimer or heterodimer enhances the susceptibility of the cancer to the additional agent (for example, chemotherapeutic agent, hormonal therapeutic agent, and or kinase inhibitor) by about or at least about 5, 10, 15, 20, 25, 30, 35, 40, 45, 50, 60, 70, 80, 90, 100, 200, 300, 400, 500, 600, 700, 800, 900, 1000, 2000% or more relative to the additional agent alone.

[0211] Certain combination therapies employ one or more chemotherapeutic agents, for example, small molecule chemotherapeutic agents. Non-limiting examples of chemotherapeutic agents include alkylating agents, anti-metabolites, cytotoxic antibiotics, topoisomerase inhibitors (type 1 or type II), an anti-microtubule agents, among others.

[0212] Examples of alkylating agents include nitrogen mustards (e.g., mechlorethamine, cyclophosphamide, mustine, melphalan, chlorambucil, ifosfamide, and busulfan), nitrosoureas (e.g., N-Nitroso-N-methylurea (MNU), carmustine (BCNU), lomustine (CCNU), semustine (MeCCNU), fotemustine, and streptozotocin), tetrazines (e.g., dacarbazine, mitozolomide, and temozolomide), aziridines (e.g., thiotepa, mytomycin, and diaziquone (AZQ)), cisplatins and derivatives thereof (e.g., carboplatin and oxaliplatin), and non-classical alkylating agents (optionally procarbazine and hexamethylmelamine).

[0213] Examples of anti-metabolites include anti-folates (e.g., methotrexate and pemetrexed), fluoropyrimidines (e.g., 5-fluorouracil and capecitabine), deoxynucleoside analogues (e.g., ancitabine, enocitabine, cytarabine, gemcitabine, decitabine, azacitidine, fludarabine, nelarabine, cladribine, clofarabine, fludarabine, and pentostatin), and thiopurines (e.g., thioguanine and mercaptopurine); Examples of cytotoxic antibiotics include anthracyclines (e.g., doxorubicin, daunorubicin, epirubicin, idarubicin, pirarubicin, aclarubicin, and mitoxantrone), bleomycins, mitomycin C, mitoxantrone, and actinomycin. Examples of topoisomerase inhibitors include camptothecin, irinotecan, topotecan, etoposide, doxorubicin, mitoxantrone, teniposide, novobiocin, merbarone, and aclarubicin.

[0214] Examples of anti-microtubule agents include taxanes (e.g., paclitaxel and docetaxel) and vinca alkaloids (e.g., vinblastine, vincristine, vindesine, vinorelbine).

[0215] The various chemotherapeutic agents described herein can be combined with any one or more of the attenuated protein homodimers or heterodimers described herein, and used according to any one or more of the methods or compositions described herein.

[0216] Certain combination therapies employ at least one hormonal therapeutic agent. General examples of hormonal therapeutic agents include hormonal agonists and hormonal antagonists. Particular examples of hormonal agonists include progestogen (progestin), corticosteroids (e.g., prednisolone, methylprednisolone, dexamethasone), insulin like growth factors, VEGF derived angiogenic and lymphangiogenic factors (e.g., VEGF-A, VEGF-A145, VEGF-A165, VEGF-C, VEGF-D, PIGF-2), fibroblast growth factor (FGF), galectin, hepatocyte growth factor (HGF), platelet derived growth factor (PDGF), transforming growth factor (TGF)-beta, androgens, estrogens, and somatostatin analogs. Examples of hormonal antagonists include hormone synthesis inhibitors such as aromatase inhibitors and gonadotropin-releasing hormone (GnRH)s agonists (e.g., leuprolide, goserelin, triptorelin, histrelin) including analogs thereof. Also included are hormone receptor antagonist such as selective estrogen receptor modulators (SERMs; e.g., tamoxifen, raloxifene, toremifene) and anti-androgens (e.g., flutamide, bicalutamide, nilutamide).

[0217] Also included are hormonal pathway inhibitors such as antibodies directed against hormonal receptors. Examples include inhibitors of the IGF receptor (e.g., IGF-IR1) such as cixutumumab, dalotuzumab, figitumumab, ganitumab, istiratumab, and robatumumab; inhibitors of the vascular endothelial growth factor receptors 1, 2 or 3 (VEGFR1, VEGFR2 or VEGFR3) such as alacizumab pegol, bevacizumab, icrucumab, ramucirumab; inhibitors of the TGF-beta receptors R1, R2, and R3 such as fresolimumab and metelimumab; inhibitors of c-Met such as naxitamab; inhibitors of the EGF receptor such as cetuximab, depatuxizumab mafodotin, futuximab, imgatuzumab, laprituximab emtansine, matuzumab, modotuximab, necitumumab, nimotuzumab, panitumumab, tomuzotuximab, and zalutumumab; inhibitors of the FGF receptor such as aprutumab ixadotin and bemarituzumab; and inhibitors of the PDGF receptor such as olaratumab and tovetumab.

[0218] The various hormonal therapeutic agents described herein can be combined with any one or more of the various attenuated protein homodimers or heterodimers described herein, and used according to any one or more of the methods or compositions described herein.

[0219] Certain combination therapies employ at least one kinase inhibitor, including tyrosine kinase inhibitors. Examples of kinase inhibitors include, without limitation, adavosertib, afanitib, aflibercept, axitinib, bevacizumab, bosutinib, cabozantinib, cetuximab, cobimetinib, crizotinib, dasatinib, entrectinib, erdafitinib, erlotinib, fostamitinib, gefitinib, ibrutinib, imatinib, lapatinib, lenvatinib, mubritinib, nilotinib, panitumumab, pazopanib, pegaptanib, ponatinib, ranibizumab, regorafenib, ruxolitinib, sorafenib, sunitinib, SU6656, tofacitinib, trastuzumab, vandetanib, and vemuafenib.

[0220] The various kinase inhibitors described herein can be combined with any one or more of the various attenuated protein homodimers or heterodimers described herein, and used according to any one or more of the methods or compositions described herein.

[0221] In some embodiments, the methods and pharmaceutical compositions described herein increase median survival time of a subject by 4 weeks, 5 weeks, 6 weeks, 7 weeks, 8 weeks, 9 weeks, 10 weeks, 15 weeks, 20 weeks, 25 weeks, 30 weeks, 40 weeks, or longer. In certain embodiments, the methods and pharmaceutical compositions described herein increase median survival time of a subject by 1 year, 2 years, 3 years, or longer. In some embodiments, the methods and pharmaceutical compositions increase progression-free survival by 2 weeks, 3 weeks, 4 weeks, 5 weeks, 6 weeks, 7 weeks, 8 weeks, 9 weeks, 10 weeks or longer. In certain embodiments, the methods and pharmaceutical compositions described herein increase progression-free survival by 1 year, 2 years, 3 years, or longer.

[0222] In certain embodiments, the methods and therapeutic compositions described herein are sufficient to result in tumor regression, as indicated by a statistically significant decrease in the amount of viable tumor, for example, at least a 10%, 20%, 30%, 40%, 50% or greater decrease in tumor mass, or by altered (e.g., decreased with statistical significance) scan dimensions. In certain embodiments, the methods and therapeutic compositions described herein are sufficient to result in stable disease.

[0223] In some embodiments, the disease is a viral disease or viral infection. In certain embodiments, the viral infection is selected from one or more of human immunodeficiency virus (HIV), Hepatitis A, Hepatitis B, Hepatitis C, Hepatitis E, Caliciviruses associated diarrhoea, Rotavirus diarrhoea, Haemophilus influenzae B pneumonia and invasive disease, influenza, measles, mumps, rubella, Parainfluenza associated pneumonia, Respiratory syncytial virus (RSV) pneumonia, Severe Acute Respiratory Syndrome (SARS), Human papillomavirus, Herpes simplex type 2 genital ulcers, Dengue Fever, Japanese encephalitis, Tick-borne encephalitis, West-Nile virus associated disease, Yellow Fever, Epstein-Barr virus, Lassa fever, Crimean-Congo haemorrhagic fever, Ebola haemorrhagic fever, Marburg haemorrhagic fever, Rabies, Rift Valley fever, Smallpox, upper and lower respiratory infections, and poliomyelitis. In specific embodiments, the subject is HIV-positive. In some embodiments, the methods and pharmaceutical compositions described herein increase an anti-viral immune response by about or at least about 5, 10, 15, 20, 25, 30, 35, 40, 45, 50, 60, 70, 80, 90, 100, 200, 300, 400, 500, 600, 700, 800, 900, 1000, 2000% or more, relative to a control.

[0224] In some embodiments, the immune disorder is selected from one or more of type 1 diabetes, vasculitis, and an immunodeficiency. In some embodiments, the methods and pharmaceutical compositions described herein improve immune function in the subject, for example, by about or at least about 5, 10, 15, 20, 25, 30, 35, 40, 45, 50, 60, 70, 80, 90, 100, 200, 300, 400, 500, 600, 700, 800, 900, 1000, 2000% or more, relative to a control.

[0225] In certain embodiments, the methods and therapeutic compositions described herein are sufficient to result in clinically relevant reduction in symptoms of a particular disease indication known to the skilled clinician.

[0226] For in vivo use, as noted above, for the treatment of human or non-human mammalian disease or testing, the agents described herein are generally incorporated into one or more therapeutic or pharmaceutical compositions prior to administration, including veterinary therapeutic compositions.

[0227] Thus, certain embodiments relate to pharmaceutical or therapeutic compositions that comprise at least one attenuated protein homodimer or heterodimer, as described herein, or an IL-12A (p35) protein variant, as described herein. In some instances, a pharmaceutical or therapeutic composition comprises one or more of the attenuated protein homodimers or heterodimers described herein, or an IL-12A (p35) protein variant, as described herein, in combination with a pharmaceutically- or physiologically-acceptable carrier or excipient. Certain pharmaceutical or therapeutic compositions further comprise at least one additional agent, for example, a chemotherapeutic agent, a hormonal therapeutic agent, and/or a kinase inhibitor as described herein.

[0228] Some therapeutic compositions comprise (and certain methods utilize) only one attenuated protein homodimer or heterodimer or IL-12A protein variant. Certain therapeutic compositions comprise (and certain methods utilize) a mixture of at least two, three, four, or five different attenuated protein homodimers, heterodimers, and/or IL-12A (p35) protein variants, as described herein.

[0229] In particular embodiments, the pharmaceutical or therapeutic compositions comprising at least one protein described herein is substantially pure on a protein basis or a weight-weight basis, for example, the composition has a purity of at least about 80%, 85%, 90%, 95%, 98%, or 99% on a protein basis or a weight-weight basis.

[0230] In some embodiments, the proteins described herein do not form aggregates, have a desired solubility, and/or have an immunogenicity profile that is suitable for use in humans, as known in the art. Thus, in some embodiments, the therapeutic composition comprising a protein described herein is substantially aggregate-free. For example, certain compositions comprise less than about 10% (on a protein basis) high molecular weight aggregated proteins, or less than about 5% high molecular weight aggregated proteins, or less than about 4% high molecular weight aggregated proteins, or less than about 3% high molecular weight aggregated proteins, or less than about 2% high molecular weight aggregated proteins, or less than about 1% high molecular weight aggregated proteins. Some compositions comprise a protein that is at least about 50%, about 60%, about 70%, about 80%, about 90% or about 95% monodisperse with respect to its apparent molecular mass.

[0231] In some embodiments, the proteins described herein are concentrated to about or at least about 0.1 mg/ml, 0.2 mg/ml, 0.3 mg/ml, 0.4 mg/ml, 0.5 mg/ml, 0.6, 0.7, 0.8, 0.9, 1 mg/ml, 2 mg/ml, 3 mg/ml, 4 mg/ml, 5 mg/ml, 6 mg/ml, 7 mg/ml, 8 mg/ml, 9 mg/ml, 10 mg/ml, 11, 12, 13, 14 or 15 mg/ml and are formulated for biotherapeutic uses.

[0232] To prepare a therapeutic or pharmaceutical composition, an effective or desired amount of one or more agents is mixed with any pharmaceutical carrier(s) or excipient known to those skilled in the art to be suitable for the particular agent and/or mode of administration. A pharmaceutical carrier may be liquid, semi-liquid or solid. Solutions or suspensions used for parenteral, intradermal, subcutaneous or topical application may include, for example, a sterile diluent (such as water), saline solution (e.g., phosphate buffered saline; PBS), fixed oil, polyethylene glycol, glycerin, propylene glycol or other synthetic solvent; antimicrobial agents (such as benzyl alcohol and methyl parabens); antioxidants (such as ascorbic acid and sodium bisulfite) and chelating agents (such as ethylenediaminetetraacetic acid (EDTA)); buffers (such as acetates, citrates and phosphates). If administered intravenously (e.g., by IV infusion), suitable carriers include physiological saline or phosphate buffered saline (PBS), and solutions containing thickening and solubilizing agents, such as glucose, polyethylene glycol, polypropylene glycol and mixtures thereof.

[0233] Administration of agents described herein, in pure form or in an appropriate therapeutic or pharmaceutical composition, can be carried out via any of the accepted modes of administration of agents for serving similar utilities. The therapeutic or pharmaceutical compositions can be prepared by combining an agent-containing composition with an appropriate physiologically acceptable carrier, diluent or excipient, and may be formulated into preparations in solid, semi-solid, liquid or gaseous forms, such as tablets, capsules, powders, granules, ointments, solutions, suppositories, injections, inhalants, gels, microspheres, and aerosols. In addition, other pharmaceutically active ingredients (including other small molecules as described elsewhere herein) and/or suitable excipients such as salts, buffers and stabilizers may, but need not, be present within the composition.

[0234] Administration may be achieved by a variety of different routes, including oral, parenteral, nasal, intravenous, intradermal, intramuscular, subcutaneous or topical. Preferred modes of administration depend upon the nature of the condition to be treated or prevented. Particular embodiments include administration by IV infusion.

[0235] Carriers can include, for example, pharmaceutically- or physiologically-acceptable carriers, excipients, or stabilizers that are non-toxic to the cell or mammal being exposed thereto at the dosages and concentrations employed. Often the physiologically-acceptable carrier is an aqueous pH buffered solution. Examples of physiologically acceptable carriers include buffers such as phosphate, citrate, and other organic acids; antioxidants including ascorbic acid; low molecular weight (less than about 10 residues) polypeptide; proteins, such as serum albumin, gelatin, or immunoglobulins; hydrophilic polymers such as polyvinylpyrrolidone; amino acids such as glycine, glutamine, asparagine, arginine or lysine; monosaccharides, disaccharides, and other carbohydrates including glucose, mannose, or dextrins; chelating agents such as EDTA; sugar alcohols such as mannitol or sorbitol; salt-forming counterions such as sodium; and/or nonionic surfactants such as polysorbate 20 (TWEEN™) polyethylene glycol (PEG), and poloxamers (PLURONICS™), and the like.

[0236] In some embodiments, one or more agents can be entrapped in microcapsules prepared, for example, by coacervation techniques or by interfacial polymerization (for example, hydroxymethylcellulose or gelatin-microcapsules and poly-(methylmethacylate)microcapsules, respectively), in colloidal drug delivery systems (for example, liposomes, albumin microspheres, microemulsions, nano-particles and nanocapsules), or in macroemulsions. Such techniques are disclosed in Remington's Pharmaceutical Sciences, 16th edition, Oslo, A., Ed., (1980). The particle(s) or liposomes may further comprise other therapeutic or diagnostic agents.

[0237] The precise dosage and duration of treatment is a function of the disease being treated and may be determined empirically using known testing protocols or by testing the compositions in model systems known in the art and extrapolating therefrom. Controlled clinical trials may also be performed. Dosages may also vary with the severity of the condition to be alleviated. A pharmaceutical composition is generally formulated and administered to exert a therapeutically useful effect while minimizing undesirable side effects. The composition may be administered one time, or may be divided into a number of smaller doses to be administered at intervals of time. For any particular subject, specific dosage regimens may be adjusted over time according to the individual need.

[0238] Typical routes of administering these and related therapeutic or pharmaceutical compositions thus include, without limitation, oral, topical, transdermal, inhalation, parenteral, sublingual, buccal, rectal, vaginal, and intranasal. The term parenteral as used herein includes subcutaneous injections, intravenous, intramuscular, intrasternal injection or infusion techniques. Therapeutic or pharmaceutical compositions according to certain embodiments of the present disclosure are formulated so as to allow the active ingredients contained therein to be bioavailable upon administration of the composition to a subject or patient. Compositions that will be administered to a subject or patient may take the form of one or more dosage units, where for example, a tablet may be a single dosage unit, and a container of a herein described agent in aerosol form may hold a plurality of dosage units. Actual methods of preparing such dosage forms are known, or will be apparent, to those skilled in this art; for example, see Remington: The Science and Practice of Pharmacy, 20th Edition (Philadelphia College of Pharmacy and Science, 2000). The composition to be administered will typically contain a therapeutically effective amount of an agent described herein, for treatment of a disease or condition of interest.

[0239] A therapeutic or pharmaceutical composition may be in the form of a solid or liquid. In one embodiment, the carrier(s) are particulate, so that the compositions are, for example, in tablet or powder form. The carrier(s) may be liquid, with the compositions being, for example, an oral oil, injectable liquid or an aerosol, which is useful in, for example, inhalatory administration. When intended for oral administration, the pharmaceutical composition is preferably in either solid or liquid form, where semi-solid, semi-liquid, suspension and gel forms are included within the forms considered herein as either solid or liquid. Certain embodiments include sterile, injectable solutions.

[0240] As a solid composition for oral administration, the pharmaceutical composition may be formulated into a powder, granule, compressed tablet, pill, capsule, chewing gum, wafer or the like. Such a solid composition will typically contain one or more inert diluents or edible carriers. In addition, one or more of the following may be present: binders such as carboxymethylcellulose, ethyl cellulose, microcrystalline cellulose, gum tragacanth or gelatin; excipients such as starch, lactose or dextrins, disintegrating agents such as alginic acid, sodium alginate, Primogel, corn starch and the like; lubricants such as magnesium stearate or Sterotex; glidants such as colloidal silicon dioxide; sweetening agents such as sucrose or saccharin; a flavoring agent such as peppermint, methyl salicylate or orange flavoring; and a coloring agent. When the pharmaceutical composition is in the form of a capsule, for example, a gelatin capsule, it may contain, in addition to materials of the above type, a liquid carrier such as polyethylene glycol or oil.

[0241] The therapeutic or pharmaceutical composition may be in the form of a liquid, for example, an elixir, syrup, solution, emulsion or suspension. The liquid may be for oral administration or for delivery by injection, as two examples. When intended for oral administration, preferred composition contain, in addition to the present compounds, one or more of a sweetening agent, preservatives, dye/colorant and flavor enhancer. In a composition intended to be administered by injection, one or more of a surfactant, preservative, wetting agent, dispersing agent, suspending agent, buffer, stabilizer and isotonic agent may be included.

[0242] The liquid therapeutic or pharmaceutical compositions, whether they be solutions, suspensions or other like form, may include one or more of the following adjuvants: sterile diluents such as water for injection, saline solution, preferably physiological saline, Ringer's solution, isotonic sodium chloride, fixed oils such as synthetic mono or diglycerides which may serve as the solvent or suspending medium, polyethylene glycols, glycerin, propylene glycol or other solvents; antibacterial agents such as benzyl alcohol or methyl paraben; antioxidants such as ascorbic acid or sodium bisulfite; chelating agents such as ethylenediaminetetraacetic acid; buffers such as acetates, citrates or phosphates and agents for the adjustment of tonicity such as sodium chloride or dextrose. The parenteral preparation can be enclosed in ampoules, disposable syringes or multiple dose vials made of glass or plastic. Physiological saline is a preferred adjuvant. An injectable pharmaceutical composition is preferably sterile.

[0243] A liquid therapeutic or pharmaceutical composition intended for either parenteral or oral administration should contain an amount of an agent such that a suitable dosage will be obtained. Typically, this amount is at least 0.01% of the agent of interest in the composition. When intended for oral administration, this amount may be varied to be between 0.1 and about 70% of the weight of the composition. Certain oral therapeutic or pharmaceutical compositions contain between about 4% and about 75% of the agent of interest. In certain embodiments, therapeutic or pharmaceutical compositions and preparations are prepared so that a parenteral dosage unit contains between 0.01 to 10% by weight of the agent of interest prior to dilution.

[0244] The therapeutic or pharmaceutical compositions may be intended for topical administration, in which case the carrier may suitably comprise a solution, emulsion, ointment or gel base. The base, for example, may comprise one or more of the following: petrolatum, lanolin, polyethylene glycols, bee wax, mineral oil, diluents such as water and alcohol, and emulsifiers and stabilizers. Thickening agents may be present in a therapeutic or pharmaceutical composition for topical administration. If intended for transdermal administration, the composition may include a transdermal patch or iontophoresis device.

[0245] The therapeutic or pharmaceutical compositions may be intended for rectal administration, in the form, for example, of a suppository, which will melt in the rectum and release the drug. The composition for rectal administration may contain an oleaginous base as a suitable nonirritating excipient. Such bases include, without limitation, lanolin, cocoa butter, and polyethylene glycol.

[0246] The therapeutic or pharmaceutical composition may include various materials, which modify the physical form of a solid or liquid dosage unit. For example, the composition may include materials that form a coating shell around the active ingredients. The materials that form the coating shell are typically inert, and may be selected from, for example, sugar, shellac, and other enteric coating agents. Alternatively, the active ingredients may be encased in a gelatin capsule. The therapeutic or pharmaceutical compositions in solid or liquid form may include a component that binds to agent and thereby assists in the delivery of the compound. Suitable components that may act in this capacity include monoclonal or polyclonal antibodies, one or more proteins or a liposome.

[0247] The therapeutic or pharmaceutical composition may consist essentially of dosage units that can be administered as an aerosol. The term aerosol is used to denote a variety of systems ranging from those of colloidal nature to systems consisting of pressurized packages. Delivery may be by a liquefied or compressed gas or by a suitable pump system that dispenses the active ingredients. Aerosols may be delivered in single phase, bi-phasic, or tri-phasic systems in order to deliver the active ingredient(s). Delivery of the aerosol includes the necessary container, activators, valves, subcontainers, and the like, which together may form a kit. One of ordinary skill in the art, without undue experimentation may determine preferred aerosols.

[0248] The compositions described herein may be prepared with carriers that protect the agents against rapid elimination from the body, such as time release formulations or coatings. Such carriers include controlled release formulations, such as, but not limited to, implants and microencapsulated delivery systems, and biodegradable, biocompatible polymers, such as ethylene vinyl acetate, polyanhydrides, polyglycolic acid, polyorthoesters, polylactic acid and others known to those of ordinary skill in the art.

[0249] The therapeutic or pharmaceutical compositions may be prepared by methodology well known in the pharmaceutical art. For example, a therapeutic or pharmaceutical composition intended to be administered by injection may comprise one or more of salts, buffers and/or stabilizers, with sterile, distilled water so as to form a solution. A surfactant may be added to facilitate the formation of a homogeneous solution or suspension. Surfactants are compounds that non-covalently interact with the agent so as to facilitate dissolution or homogeneous suspension of the agent in the aqueous delivery system.

[0250] The therapeutic or pharmaceutical compositions may be administered in a therapeutically effective amount, which will vary depending upon a variety of factors including the activity of the specific compound employed; the metabolic stability and length of action of the compound; the age, body weight, general health, sex, and diet of the subject; the mode and time of administration; the rate of excretion; the drug combination; the severity of the particular disorder or condition; and the subject undergoing therapy. In some instances, a therapeutically effective daily dose is (for a 70 kg mammal) from about 0.001 mg/kg (i.e., ˜0.07 mg) to about 100 mg/kg (i.e., ˜7.0 g); preferably a therapeutically effective dose is (for a 70 kg mammal) from about 0.01 mg/kg (i.e., ˜0.7 mg) to about 50 mg/kg (i.e., ˜3.5 g); more preferably a therapeutically effective dose is (for a 70 kg mammal) from about 1 mg/kg (i.e., ˜70 mg) to about 25 mg/kg (i.e., ˜1.75 g). In some embodiments, the therapeutically effective dose is administered on a weekly, bi-weekly, or monthly basis. In specific embodiments, the therapeutically effective dose is administered on a weekly, bi-weekly, or monthly basis, for example, at a dose of about 1-10 or 1-5 mg/kg, or about 1, 2, 3, 4, 5, 6, 7, 8, 9, or 10 mg/kg.

[0251] The combination therapies described herein may include administration of a single pharmaceutical dosage formulation, which contains an attenuated protein homodimer or heterodimer and an additional therapeutic agent (e.g., chemotherapeutic agent, hormonal therapeutic agent, kinase inhibitor), as well as administration of compositions comprising an attenuated protein homodimer or heterodimer and an additional therapeutic agent in its own separate pharmaceutical dosage formulation. For example, an attenuated protein homodimer or heterodimer and an additional therapeutic agent can be administered to the subject together in a single oral dosage composition such as a tablet or capsule, or each agent administered in separate oral dosage formulations. Similarly, an attenuated protein homodimer or heterodimer and an additional therapeutic agent can be administered to the subject together in a single parenteral dosage composition such as in a saline solution or other physiologically acceptable solution, or each agent administered in separate parenteral dosage formulations. As another example, for cell-based therapies, an attenuated protein homodimer or heterodimer can be mixed with the cells prior to administration, administered as part of a separate composition, or both. Where separate dosage formulations are used, the compositions can be administered at essentially the same time, i.e., concurrently, or at separately staggered times, i.e., sequentially and in any order; combination therapy is understood to include all these regimens.

[0252] Also included are patient care kits, comprising (a) at least one attenuated protein homodimer or heterodimer, as described herein; and optionally (b) at least one additional therapeutic agent (e.g., chemotherapeutic agent, hormonal therapeutic agent, kinase inhibitor). In certain kits, (a) and (b) are in separate therapeutic compositions. In some kits, (a) and (b) are in the same therapeutic composition.

[0253] The kits herein may also include a one or more additional therapeutic agents or other components suitable or desired for the indication being treated, or for the desired diagnostic application. The kits herein can also include one or more syringes or other components necessary or desired to facilitate an intended mode of delivery (e.g., stents, implantable depots, etc.).

[0254] In some embodiments, a patient care kit contains separate containers, dividers, or compartments for the composition(s) and informational material(s). For example, the composition(s) can be contained in a bottle, vial, or syringe, and the informational material(s) can be contained in association with the container. In some embodiments, the separate elements of the kit are contained within a single, undivided container. For example, the composition is contained in a bottle, vial or syringe that has attached thereto the informational material in the form of a label. In some embodiments, the kit includes a plurality (e.g., a pack) of individual containers, each containing one or more unit dosage forms (e.g., a dosage form described herein) of an attenuated protein homodimer or heterodimer and optionally at least one additional therapeutic agent. For example, the kit includes a plurality of syringes, ampules, foil packets, or blister packs, each containing a single unit dose of an attenuated protein homodimer or heterodimer and optionally at least one additional therapeutic agent. The containers of the kits can be air tight, waterproof (e.g., impermeable to changes in moisture or evaporation), and/or light-tight.

[0255] The patient care kit optionally includes a device suitable for administration of the composition, e.g., a syringe, inhalant, dropper (e.g., eye dropper), swab (e.g., a cotton swab or wooden swab), or any such delivery device. In some embodiments, the device is an implantable device that dispenses metered doses of the agent(s). Also included are methods of providing a kit, e.g., by combining the components described herein.

[0256] Expression and Purification Systems

[0257] Certain embodiments include methods and related compositions for expressing and purifying the protein components of an attenuated protein homodimer or heterodimer, as described herein, or an IL-12A (p35) protein variant, as described herein. Such recombinant proteins can be conveniently prepared using standard protocols as described for example in Sambrook, et al., (1989, supra), in particular Sections 16 and 17; Ausubel et al., (1994, supra), in particular Chapters 10 and 16; and Coligan et al., Current Protocols in Protein Science (John Wiley & Sons, Inc. 1995-1997), in particular Chapters 1, 5 and 6. As one general example, may be prepared by a procedure including one or more of the steps of: (a) preparing one or more vectors or constructs comprising one or more polynucleotide sequences that encode a first polypeptide (and optionally a second polypeptide, or additional polypeptides, for example, a region of an ABD) of a homodimer or heterodimer, which are operably linked to one or more regulatory elements; (b) introducing the one or more vectors or constructs into one or more host cells; (c) culturing the one or more host cell to express the polypeptides, which bind together to form an attenuated protein homodimer or heterodimer; and (d) isolating the attenuated protein homodimer or heterodimer from the host cell. Alternatively, especially for heterodimers, the first and second polypeptides, or any additional polypeptides (e.g., a region of an ABD), can be produced in separate host cells, isolated separately, and then combined to form an attenuated protein heterodimer.

[0258] To express a desired polypeptide, a nucleotide sequence encoding one or more proteins of interest may be inserted into appropriate expression vector(s), i.e., vector(s) which contain the necessary elements for the transcription and translation of the inserted coding sequence. Methods which are well known to those skilled in the art may be used to construct expression vectors containing sequences encoding a polypeptide of interest and appropriate transcriptional and translational control elements. These methods include in vitro recombinant DNA techniques, synthetic techniques, and in vivo genetic recombination. Such techniques are described in Sambrook et al., Molecular Cloning, A Laboratory Manual (1989), and Ausubel et al., Current Protocols in Molecular Biology (1989).

[0259] A variety of expression vector/host systems are known and may be utilized to contain and express polynucleotide sequences. These include, but are not limited to, microorganisms such as bacteria transformed with recombinant bacteriophage, plasmid, or cosmid DNA expression vectors; yeast transformed with yeast expression vectors; insect cell systems infected with virus expression vectors (e.g., baculovirus); plant cell systems transformed with virus expression vectors (e.g., cauliflower mosaic virus, CaMV; tobacco mosaic virus, TMV) or with bacterial expression vectors (e.g., Ti or pBR322 plasmids); or animal cell systems, including mammalian cell and more specifically human cell systems.

[0260] The “control elements” or “regulatory sequences” present in an expression vector are those non-translated regions of the vector-enhancers, promoters, 5′ and 3′ untranslated regions—which interact with host cellular proteins to carry out transcription and translation. Such elements may vary in their strength and specificity. Depending on the vector system and host utilized, any number of suitable transcription and translation elements, including constitutive and inducible promoters, may be used. For example, when cloning in bacterial systems, inducible promoters such as the hybrid lacZ promoter of the PBLUESCRIPT phagemid (Stratagene, La Jolla, Calif.) or PSPORT1 plasmid (Gibco BRL, Gaithersburg, Md.) and the like may be used. In mammalian cell systems, promoters from mammalian genes or from mammalian viruses are generally preferred. If it is necessary to generate a cell line that contains multiple copies of the sequence encoding a polypeptide, vectors based on SV40 or EBV may be advantageously used with an appropriate selectable marker.

[0261] In bacterial systems, a number of expression vectors may be selected depending upon the use intended for the expressed polypeptide. For example, when large quantities are needed, vectors which direct high level expression of fusion proteins that are readily purified may be used. Such vectors include, but are not limited to, the multifunctional E. coli cloning and expression vectors such as BLUESCRIPT (Stratagene), in which the sequence encoding the polypeptide of interest may be ligated into the vector in frame with sequences for the amino-terminal Met and the subsequent 7 residues of β-galactosidase so that a hybrid protein is produced; pIN vectors (Van Heeke & Schuster, J. Biol. Chem. 264:5503 5509 (1989)); and the like. pGEX Vectors (Promega, Madison, Wis.) may also be used to express foreign polypeptides as fusion proteins with glutathione S-transferase (GST). In general, such fusion proteins are soluble and can easily be purified from lysed cells by adsorption to glutathione-agarose beads followed by elution in the presence of free glutathione. Proteins made in such systems may be designed to include heparin, thrombin, or factor XA protease cleavage sites so that the cloned polypeptide of interest can be released from the GST moiety at will.

[0262] Certain embodiments employ E. coli-based expression systems (see, e.g., Structural Genomics Consortium et al., Nature Methods. 5:135-146, 2008). These and related embodiments may rely partially or totally on ligation-independent cloning (LIC) to produce a suitable expression vector. In specific embodiments, protein expression may be controlled by a T7 RNA polymerase (e.g., pET vector series). These and related embodiments may utilize the expression host strain BL21(DE3), a λDE3 lysogen of BL21 that supports T7-mediated expression and is deficient in lon and ompT proteases for improved target protein stability. Also included are expression host strains carrying plasmids encoding tRNAs rarely used in E. coli, such as ROSETTA™ (DE3) and Rosetta 2 (DE3) strains. Cell lysis and sample handling may also be improved using reagents sold under the trademarks BENZONASE® nuclease and BUGBUSTER® Protein Extraction Reagent. For cell culture, auto-inducing media can improve the efficiency of many expression systems, including high-throughput expression systems. Media of this type (e.g., OVERNIGHT EXPRESS™ Autoinduction System) gradually elicit protein expression through metabolic shift without the addition of artificial inducing agents such as IPTG. Particular embodiments employ hexahistidine tags (such as those sold under the trademark HIS•TAG® fusions), followed by immobilized metal affinity chromatography (IMAC) purification, or related techniques. In certain aspects, however, clinical grade proteins can be isolated from E. coli inclusion bodies, without or without the use of affinity tags (see, e.g., Shimp et al., Protein Expr Purif. 50:58-67, 2006). As a further example, certain embodiments may employ a cold-shock induced E. coli high-yield production system, because over-expression of proteins in Escherichia coli at low temperature improves their solubility and stability (see, e.g., Qing et al., Nature Biotechnology. 22:877-882, 2004).

[0263] Also included are high-density bacterial fermentation systems. For example, high cell density cultivation of Ralstonia eutropha allows protein production at cell densities of over 150 g/L, and the expression of recombinant proteins at titers exceeding 10 g/L.

[0264] In the yeast Saccharomyces cerevisiae, a number of vectors containing constitutive or inducible promoters such as alpha factor, alcohol oxidase, and PGH may be used. For reviews, see Ausubel et al. (supra) and Grant et al., Methods Enzymol. 153:516-544 (1987). Also included are Pichia pandoris expression systems (see, e.g., Li et al., Nature Biotechnology. 24, 210-215, 2006; and Hamilton et al., Science, 301:1244, 2003). Certain embodiments include yeast systems that are engineered to selectively glycosylate proteins, including yeast that have humanized N-glycosylation pathways, among others (see, e.g., Hamilton et al., Science. 313:1441-1443, 2006; Wildt et al., Nature Reviews Microbiol. 3:119-28, 2005; and Gerngross et al., Nature-Biotechnology. 22:1409-1414, 2004; U.S. Pat. Nos. 7,629,163; 7,326,681; and 7,029,872). Merely by way of example, recombinant yeast cultures can be grown in Fernbach Flasks or 15 L, 50 L, 100 L, and 200 L fermentors, among others.

[0265] In cases where plant expression vectors are used, the expression of sequences encoding polypeptides may be driven by any of a number of promoters. For example, viral promoters such as the 35S and 19S promoters of CaMV may be used alone or in combination with the omega leader sequence from TMV (Takamatsu, EMBO J. 6:307-311 (1987)). Alternatively, plant promoters such as the small subunit of RUBISCO or heat shock promoters may be used (Coruzzi et al., EMBO J. 3:1671-1680 (1984); Broglie et al., Science 224:838-843 (1984); and Winter et al., Results Probl. Cell Differ. 17:85-105 (1991)). These constructs can be introduced into plant cells by direct DNA transformation or pathogen-mediated transfection. Such techniques are described in a number of generally available reviews (see, e.g., Hobbs in McGraw Hill, Yearbook of Science and Technology, pp. 191-196 (1992)).

[0266] An insect system may also be used to express a polypeptide of interest. For example, in one such system, Autographa californica nuclear polyhedrosis virus (AcNPV) is used as a vector to express foreign genes in Spodoptera frugiperda cells or in Trichoplusia cells. The sequences encoding the polypeptide may be cloned into a non-essential region of the virus, such as the polyhedrin gene, and placed under control of the polyhedrin promoter. Successful insertion of the polypeptide-encoding sequence will render the polyhedrin gene inactive and produce recombinant virus lacking coat protein. The recombinant viruses may then be used to infect, for example, S. frugiperda cells or Trichoplusia cells in which the polypeptide of interest may be expressed (Engelhard et al., Proc. Natl. Acad. Sci. U.S.A. 91:3224-3227 (1994)). Also included are baculovirus expression systems, including those that utilize SF9, SF21, and T. ni cells (see, e.g., Murphy and Piwnica-Worms, Curr Protoc Protein Sci. Chapter 5:Unit 5.4, 2001). Insect systems can provide post-translation modifications that are similar to mammalian systems.

[0267] In mammalian host cells, a number of viral-based expression systems are generally available. For example, in cases where an adenovirus is used as an expression vector, sequences encoding a polypeptide of interest may be ligated into an adenovirus transcription/translation complex consisting of the late promoter and tripartite leader sequence. Insertion in a non-essential E1 or E3 region of the viral genome may be used to obtain a viable virus which is capable of expressing the polypeptide in infected host cells (Logan & Shenk, Proc. Natl. Acad. Sci. U.S.A. 81:3655-3659 (1984)). In addition, transcription enhancers, such as the Rous sarcoma virus (RSV) enhancer, may be used to increase expression in mammalian host cells.

[0268] Examples of useful mammalian host cell lines include monkey kidney CV1 line transformed by SV40 (COS-7, ATCC CRL 1651); human embryonic kidney line (293 or 293 cells sub-cloned for growth in suspension culture, Graham et al., J. Gen Virol. 36:59 (1977)); baby hamster kidney cells (BHK, ATCC CCL 10); mouse sertoli cells (TM4, Mather, Biol. Reprod. 23:243-251 (1980)); monkey kidney cells (CV1 ATCC CCL 70); African green monkey kidney cells (VERO-76, ATCC CRL-1587); human cervical carcinoma cells (HELA, ATCC CCL 2); canine kidney cells (MDCK, ATCC CCL 34); buffalo rat liver cells (BRL 3A, ATCC CRL 1442); human lung cells (W138, ATCC CCL 75); human liver cells (Hep G2, HB 8065); mouse mammary tumor (MMT 060562, ATCC CCL51); TRI cells (Mather et al., Annals N.Y. Acad. Sci. 383:44-68 (1982)); MRC 5 cells; FS4 cells; and a human hepatoma line (Hep G2). Other useful mammalian host cell lines include Chinese hamster ovary (CHO) cells, including DHFR-CHO cells (Urlaub et al., PNAS USA 77:4216 (1980)); and myeloma cell lines such as NSO and Sp2/0. For a review of certain mammalian host cell lines suitable for protein production, see, e.g., Yazaki and Wu, Methods in Molecular Biology, Vol. 248 (B. K. C Lo, ed., Humana Press, Totowa, N.J., 2003), pp. 255-268. Certain preferred mammalian cell expression systems include CHO and HEK293-cell based expression systems. Mammalian expression systems can utilize attached cell lines, for example, in T-flasks, roller bottles, or cell factories, or suspension cultures, for example, in 1 L and 5 L spinners, 5 L, 14 L, 40 L, 100 L and 200 L stir tank bioreactors, or 20/50 L and 100/200 L WAVE bioreactors, among others known in the art.

[0269] Also included is the cell-free expression of proteins. These and related embodiments typically utilize purified RNA polymerase, ribosomes, tRNA and ribonucleotides; these reagents may be produced by extraction from cells or from a cell-based expression system.

[0270] Specific initiation signals may also be used to achieve more efficient translation of sequences encoding a polypeptide of interest. Such signals include the ATG initiation codon and adjacent sequences. In cases where sequences encoding the polypeptide, its initiation codon, and upstream sequences are inserted into the appropriate expression vector, no additional transcriptional or translational control signals may be needed. However, in cases where only coding sequence, or a portion thereof, is inserted, exogenous translational control signals including the ATG initiation codon should be provided. Furthermore, the initiation codon should be in the correct reading frame to ensure translation of the entire insert. Exogenous translational elements and initiation codons may be of various origins, both natural and synthetic. The efficiency of expression may be enhanced by the inclusion of enhancers which are appropriate for the particular cell system which is used, such as those described in the literature (Scharf. et al., Results Probl. Cell Differ. 20:125-162 (1994)).

[0271] In addition, a host cell strain may be chosen for its ability to modulate the expression of the inserted sequences or to process the expressed protein in the desired fashion. Such modifications of the polypeptide include, but are not limited to, post-translational modifications such as acetylation, carboxylation, glycosylation, phosphorylation, lipidation, and acylation. Post-translational processing which cleaves a “prepro” form of the protein may also be used to facilitate correct insertion, folding and/or function. Different host cells such as yeast, CHO, HeLa, MDCK, HEK293, and W138, in addition to bacterial cells, which have or even lack specific cellular machinery and characteristic mechanisms for such post-translational activities, may be chosen to ensure the correct modification and processing of the foreign protein.

[0272] For long-term, high-yield production of recombinant proteins, stable expression is generally preferred. For example, cell lines which stably express a polynucleotide of interest may be transformed using expression vectors which may contain viral origins of replication and/or endogenous expression elements and a selectable marker gene on the same or on a separate vector. Following the introduction of the vector, cells may be allowed to grow for about 1-2 days in an enriched media before they are switched to selective media. The purpose of the selectable marker is to confer resistance to selection, and its presence allows growth and recovery of cells which successfully express the introduced sequences. Resistant clones of stably transformed cells may be proliferated using tissue culture techniques appropriate to the cell type. Transient production, such as by transient transfection or infection, can also be employed. Exemplary mammalian expression systems that are suitable for transient production include HEK293 and CHO-based systems.

[0273] Any number of selection systems may be used to recover transformed or transduced cell lines. These include, but are not limited to, the herpes simplex virus thymidine kinase (Wigler et al., Cell 11:223-232 (1977)) and adenine phosphoribosyltransferase (Lowy et al., Cell 22:817-823 (1990)) genes which can be employed in tk- or aprt-cells, respectively. Also, antimetabolite, antibiotic or herbicide resistance can be used as the basis for selection; for example, dhfr which confers resistance to methotrexate (Wigler et al., Proc. Natl. Acad. Sci. U.S.A. 77:3567-70 (1980)); npt, which confers resistance to the aminoglycosides, neomycin and G-418 (Colbere-Garapin et al., J. Mol. Biol. 150:1-14 (1981)); and als or pat, which confer resistance to chlorsulfuron and phosphinotricin acetyltransferase, respectively (Murry, supra). Additional selectable genes have been described, for example, trpB, which allows cells to utilize indole in place of tryptophan, or hisD, which allows cells to utilize histinol in place of histidine (Hartman & Mulligan, Proc. Natl. Acad. Sci. U.S.A. 85:8047-51 (1988)). The use of visible markers has gained popularity with such markers as green fluorescent protein (GFP) and other fluorescent proteins (e.g., RFP, YFP), anthocyanins, β-glucuronidase and its substrate GUS, and luciferase and its substrate luciferin, being widely used not only to identify transformants, but also to quantify the amount of transient or stable protein expression attributable to a specific vector system (see, e.g., Rhodes et al., Methods Mol. Biol. 55:121-131 (1995)).

[0274] Also included are high-throughput protein production systems, or micro-production systems. Certain aspects may utilize, for example, hexa-histidine fusion tags for protein expression and purification on metal chelate-modified slide surfaces or MagneHis Ni-Particles (see, e.g., Kwon et al., BMC Biotechnol. 9:72, 2009; and Lin et al., Methods Mol Biol. 498:129-41, 2009)). Also included are high-throughput cell-free protein expression systems (see, e.g., Sitaraman et al., Methods Mol Biol. 498:229-44, 2009).

[0275] A variety of protocols for detecting and measuring the expression of polynucleotide-encoded products, using binding agents or antibodies such as polyclonal or monoclonal antibodies specific for the product, are known in the art. Examples include enzyme-linked immunosorbent assay (ELISA), western immunoblots, radioimmunoassays (RIA), and fluorescence activated cell sorting (FACS). These and other assays are described, among other places, in Hampton et al., Serological Methods, a Laboratory Manual (1990) and Maddox et al., J. Exp. Med. 158:1211-1216 (1983).

[0276] A wide variety of labels and conjugation techniques are known by those skilled in the art and may be used in various nucleic acid and amino acid assays. Means for producing labeled hybridization or PCR probes for detecting sequences related to polynucleotides include oligolabeling, nick translation, end-labeling or PCR amplification using a labeled nucleotide. Alternatively, the sequences, or any portions thereof may be cloned into a vector for the production of an mRNA probe. Such vectors are known in the art, are commercially available, and may be used to synthesize RNA probes in vitro by addition of an appropriate RNA polymerase such as T7, T3, or SP6 and labeled nucleotides. These procedures may be conducted using a variety of commercially available kits. Suitable reporter molecules or labels, which may be used include radionuclides, enzymes, fluorescent, chemiluminescent, or chromogenic agents as well as substrates, cofactors, inhibitors, magnetic particles, and the like.

[0277] Host cells transformed with one or more polynucleotide sequences of interest may be cultured under conditions suitable for the expression and recovery of the protein from cell culture. Certain specific embodiments utilize serum free cell expression systems. Examples include HEK293 cells and CHO cells that can grown on serum free medium (see, e.g., Rosser et al., Protein Expr. Purif. 40:237-43, 2005; and U.S. Pat. No. 6,210,922).

[0278] A protein produced by a recombinant cell may be secreted or contained intracellularly depending on the sequence and/or the vector used. As will be understood by those of skill in the art, expression vectors containing polynucleotides may be designed to contain signal sequences which direct secretion of the encoded polypeptide through a prokaryotic or eukaryotic cell membrane. Other recombinant constructions may be used to join sequences encoding a polypeptide of interest to nucleotide sequence encoding a polypeptide domain which will facilitate purification and/or detection of soluble proteins. Examples of such domains include cleavable and non-cleavable affinity purification and epitope tags such as avidin, FLAG tags, poly-histidine tags (e.g., 6×His), cMyc tags, V5-tags, glutathione S-transferase (GST) tags, and others.

[0279] A protein produced by a recombinant cell can be purified and characterized according to a variety of techniques known in the art. Exemplary systems for performing protein purification and analyzing protein purity include fast protein liquid chromatography (FPLC) (e.g., AKTA and Bio-Rad FPLC systems), high-pressure liquid chromatography (HPLC) (e.g., Beckman and Waters HPLC). Exemplary chemistries for purification include ion exchange chromatography (e.g., Q, S), size exclusion chromatography, salt gradients, affinity purification (e.g., Ni, Co, FLAG, maltose, glutathione, protein A/G), gel filtration, reverse-phase, ceramic HYPERD® ion exchange chromatography, and hydrophobic interaction columns (HIC), among others known in the art. Also included are analytical methods such as SDS-PAGE (e.g., Coomassie, silver stain), immunoblot, Bradford, and ELISA, which may be utilized during any step of the production or purification process, typically to measure the purity of the protein composition.

[0280] Also included are methods of concentrating proteins, and compositions comprising concentrated soluble proteins, e.g., attenuated protein homodimers or heterodimers. In some aspects, such concentrated solutions of at least one protein comprise proteins at a concentration of about or at least about 5 mg/mL, 8 mg/mL, 10 mg/mL, 15 mg/mL, 20 mg/mL, or more.

[0281] In some aspects, such compositions are substantially monodisperse, meaning that a protein exists primarily (i.e., at least about 90%, or greater) in one apparent molecular weight form when assessed for example, by size exclusion chromatography, dynamic light scattering, or analytical ultracentrifugation.

[0282] In some aspects, such compositions have a purity (on a protein basis) of at least about 90%, or in some aspects at least about 95% purity, or in some embodiments, at least 98% purity. Purity may be determined via any routine analytical method as known in the art.

[0283] In some aspects, such compositions have a high molecular weight aggregate content of less than about 10%, compared to the total amount of protein present, or in some embodiments such compositions have a high molecular weight aggregate content of less than about 5%, or in some aspects such compositions have a high molecular weight aggregate content of less than about 3%, or in some embodiments a high molecular weight aggregate content of less than about 1%. High molecular weight aggregate content may be determined via a variety of analytical techniques including for example, by size exclusion chromatography, dynamic light scattering, or analytical ultracentrifugation.

[0284] Examples of concentration approaches contemplated herein include lyophilization, which is typically employed when the solution contains few soluble components other than the protein of interest. Lyophilization is often performed after HPLC run, and can remove most or all volatile components from the mixture. Also included are ultrafiltration techniques, which typically employ one or more selective permeable membranes to concentrate a protein solution. The membrane allows water and small molecules to pass through and retains the protein; the solution can be forced against the membrane by mechanical pump, gas pressure, or centrifugation, among other techniques.

[0285] In certain embodiments, a protein composition has a purity of at least about 90%, as measured according to routine techniques in the art. In certain embodiments, such as diagnostic compositions or certain pharmaceutical or therapeutic compositions, a protein composition has a purity of at least about 95%, or at least about 97% or 98% or 99%. In some embodiments, such as when being used as reference or research reagents, a protein composition can be of lesser purity, and may have a purity of at least about 50%, 60%, 70%, or 80%. Purity can be measured overall or in relation to selected components, such as other proteins, e.g., purity on a protein basis.

[0286] Purified proteins can also be characterized according to their biological characteristics. Binding affinity and binding kinetics can be measured according to a variety of techniques known in the art, such as Biacore® and related technologies that utilize surface plasmon resonance (SPR), an optical phenomenon that enables detection of unlabeled interactants in real time. SPR-based biosensors can be used in determination of active concentration, screening and characterization in terms of both affinity and kinetics. The presence or levels of one or more biological activities can be measured according to cell-based assays, including those that utilize at least one IL-12 receptor or receptor complex, which is optionally functionally coupled to a readout or indicator, such as a fluorescent or luminescent indicator of biological activity, as described herein.

[0287] In certain embodiments, as noted above, a composition is substantially endotoxin free, including, for example, about 95% endotoxin free, preferably about 99% endotoxin free, and more preferably about 99.99% endotoxin free. The presence of endotoxins can be detected according to routine techniques in the art, as described herein. In specific embodiments, a composition is made from a eukaryotic cell such as a mammalian or human cell in substantially serum free media. In certain embodiments, as noted herein, a composition has an endotoxin content of less than about 10 EU/mg of protein, or less than about 5 EU/mg of protein, less than about 3 EU/mg of protein, or less than about 1 EU/mg of protein.

[0288] In certain embodiments, a composition comprises less than about 10% wt/wt high molecular weight aggregates, or less than about 5% wt/wt high molecular weight aggregates, or less than about 2% wt/wt high molecular weight aggregates, or less than about or less than about 1% wt/wt high molecular weight aggregates.

[0289] Also included are protein-based analytical assays and methods, which can be used to assess, for example, protein purity, size, solubility, and degree of aggregation, among other characteristics. Protein purity can be assessed a number of ways. For instance, purity can be assessed based on primary structure, higher order structure, size, charge, hydrophobicity, and glycosylation. Examples of methods for assessing primary structure include N- and C-terminal sequencing and peptide-mapping (see, e.g., Allen et al., Biologicals. 24:255-275, 1996)). Examples of methods for assessing higher order structure include circular dichroism (see, e.g., Kelly et al., Biochim Biophys Acta. 1751:119-139, 2005), fluorescent spectroscopy (see, e.g., Meagher et al., J. Biol. Chem. 273:23283-89, 1998), FT-IR, amide hydrogen-deuterium exchange kinetics, differential scanning calorimetry, NMR spectroscopy, immunoreactivity with conformationally sensitive antibodies. Higher order structure can also be assessed as a function of a variety of parameters such as pH, temperature, or added salts. Examples of methods for assessing protein characteristics such as size include analytical ultracentrifugation and size exclusion HPLC (SEC-HPLC), and exemplary methods for measuring charge include ion-exchange chromatography and isolectric focusing. Hydrophobicity can be assessed, for example, by reverse-phase HPLC and hydrophobic interaction chromatography HPLC. Glycosylation can affect pharmacokinetics (e.g., clearance), conformation or stability, receptor binding, and protein function, and can be assessed, for example, by mass spectrometry and nuclear magnetic resonance (NMR) spectroscopy.

[0290] As noted above, certain embodiments include the use of SEC-HPLC to assess protein characteristics such as purity, size (e.g., size homogeneity) or degree of aggregation, and/or to purify proteins, among other uses. SEC, also including gel-filtration chromatography (GFC) and gel-permeation chromatography (GPC), refers to a chromatographic method in which molecules in solution are separated in a porous material based on their size, or more specifically their hydrodynamic volume, diffusion coefficient, and/or surface properties. The process is generally used to separate biological molecules, and to determine molecular weights and molecular weight distributions of polymers. Typically, a biological or protein sample (such as a protein extract produced according to the protein expression methods provided herein and known in the art) is loaded into a selected size-exclusion column with a defined stationary phase (the porous material), preferably a phase that does not interact with the proteins in the sample. In certain aspects, the stationary phase is composed of inert particles packed into a dense three-dimensional matrix within a glass or steel column. The mobile phase can be pure water, an aqueous buffer, an organic solvent, or a mixture thereof. The stationary-phase particles typically have small pores and/or channels which only allow molecules below a certain size to enter. Large particles are therefore excluded from these pores and channels, and their limited interaction with the stationary phase leads them to elute as a “totally-excluded” peak at the beginning of the experiment. Smaller molecules, which can fit into the pores, are removed from the flowing mobile phase, and the time they spend immobilized in the stationary-phase pores depends, in part, on how far into the pores they penetrate. Their removal from the mobile phase flow causes them to take longer to elute from the column and results in a separation between the particles based on differences in their size. A given size exclusion column has a range of molecular weights that can be separated. Overall, molecules larger than the upper limit will not be trapped by the stationary phase, molecules smaller than the lower limit will completely enter the solid phase and elute as a single band, and molecules within the range will elute at different rates, defined by their properties such as hydrodynamic volume. For examples of these methods in practice with pharmaceutical proteins, see Bruner et al., Journal of Pharmaceutical and Biomedical Analysis. 15: 1929-1935, 1997.

[0291] Protein purity for clinical applications is also discussed, for example, by Anicetti et al. (Trends in Biotechnology. 7:342-349, 1989). More recent techniques for analyzing protein purity include, without limitation, the LabChip GXII, an automated platform for rapid analysis of proteins and nucleic acids, which provides high throughput analysis of titer, sizing, and purity analysis of proteins. In certain non-limiting embodiments, clinical grade proteins can be obtained by utilizing a combination of chromatographic materials in at least two orthogonal steps, among other methods (see, e.g., Therapeutic Proteins: Methods and Protocols. Vol. 308, Eds., Smales and James, Humana Press Inc., 2005). Typically, protein agents are substantially endotoxin-free, as measured according to techniques known in the art and described herein.

[0292] Protein solubility assays are also included. Such assays can be utilized, for example, to determine optimal growth and purification conditions for recombinant production, to optimize the choice of buffer(s), and to optimize the choice of proteins and variants thereof. Solubility or aggregation can be evaluated according to a variety of parameters, including temperature, pH, salts, and the presence or absence of other additives. Examples of solubility screening assays include, without limitation, microplate-based methods of measuring protein solubility using turbidity or other measure as an end point, high-throughput assays for analysis of the solubility of purified recombinant proteins (see, e.g., Stenvall et al., Biochim Biophys Acta. 1752:6-10, 2005), assays that use structural complementation of a genetic marker protein to monitor and measure protein folding and solubility in vivo (see, e.g., Wigley et al., Nature Biotechnology. 19:131-136, 2001), and electrochemical screening of recombinant protein solubility in Escherichia coli using scanning electrochemical microscopy (SECM) (see, e.g., Nagamine et al., Biotechnology and Bioengineering. 96:1008-1013, 2006), among others. Proteins with increased solubility (or reduced aggregation) can be identified or selected for according to routine techniques in the art, including simple in vivo assays for protein solubility (see, e.g., Maxwell et al., Protein Sci. 8:1908-11, 1999).

[0293] Protein solubility and aggregation can also be measured by dynamic light scattering techniques. Aggregation is a general term that encompasses several types of interactions or characteristics, including soluble/insoluble, covalent/noncovalent, reversible/irreversible, and native/denatured interactions and characteristics. For protein therapeutics, the presence of aggregates is typically considered undesirable because of the concern that aggregates may cause an immunogenic reaction (e.g., small aggregates), or may cause adverse events on administration (e.g., particulates). Dynamic light scattering refers to a technique that can be used to determine the size distribution profile of small particles in suspension or polymers such as proteins in solution. This technique, also referred to as photon correlation spectroscopy (PCS) or quasi-elastic light scattering (QELS), uses scattered light to measure the rate of diffusion of the protein particles. Fluctuations of the scattering intensity can be observed due to the Brownian motion of the molecules and particles in solution. This motion data can be conventionally processed to derive a size distribution for the sample, wherein the size is given by the Stokes radius or hydrodynamic radius of the protein particle. The hydrodynamic size depends on both mass and shape (conformation). Dynamic scattering can detect the presence of very small amounts of aggregated protein (<0.01% by weight), even in samples that contain a large range of masses. It can also be used to compare the stability of different formulations, including, for example, applications that rely on real-time monitoring of changes at elevated temperatures. Accordingly, certain embodiments include the use of dynamic light scattering to analyze the solubility and/or presence of aggregates in a sample that contains a protein of the present disclosure.

[0294] All publications, patent applications, and issued patents cited in this specification are herein incorporated by reference as if each individual publication, patent application, or issued patent were specifically and individually indicated to be incorporated by reference.

### EXAMPLES

### Example 1

### Engineering and Testing of Attenuated IL-12 Homodimers

[0295] IL-12 (p35-p40) fusion proteins were generated by fusing wild-type or mutant human p35 to the N-terminus of wild-type or mutant human p40. Table E1 shows the p35 and p40 wt/mutants used in the p35-p40 fusion proteins with a His-tag at the C-terminus of p40.

TABLE E1

| | p35 | | p40 | | | |
|---|---|---|---|---|---|---|
| Protein name | Mutants | | Mutants | | | |
| P3074 | — | — | QDQD (258-261) | — | — | — |
| P3075 | — | — | QDQD (258-261) | — | — | — |
| P3076 | — | — | QDQD (258-261) | — | — | — |
| P3077 | C74S | — | QDQD (258-261) | — | C177A | — |
| P3078 | C74S | — | QDQD (258-261) | — | C177A | — |
| P3079 | C74S | — | QDQD (258-261) | — | C177A | — |
| P3080 | C74S | — | QDQD (258-261) | Y114F | C177A | — |
| P3081 | C74S | — | QDQD (258-261) | Y114F | C177A | — |
| P3082 | C74S | — | QDQD (258-261) | Y114F | C177A | — |
| P3189 | C74S | S197A | QDQD (258-261) | — | C177A | — |
| P3190 | C74S | S197A | QDQD (258-261) | — | C177A | C252S |
| P3191 | C74S | S197A | — | — | C177A | — |
| P3192 | C74S | S197A | — | — | C177A | C252S |
| P3193 | — | S197A | QDQD (258-261) | — | — | — |
| P3194 | — | S197A | QDQD (258-261) | — | — | C252S |
| P3195 | — | S197A | — | — | — | — |
| P3196 | — | S197A | — | — | — | C252S |

[0296] IL-12 (p40-p35) fusion proteins were also generated by fusing wild-type or mutant human p40 to the N-terminus of wild-type or mutant human p35. Table E2 shows the p40 and p35 wt/mutants used in the p40-p35 fusion proteins with a His-tag at the C-terminus of p35.

TABLE E2

| | p35 | | p40 | | |
|---|---|---|---|---|---|
| Protein name | Mutants | | Mutants | | |
| P3336 | C74S | — | — | C177A | — |
| P3337 | C74S | — | KSKR --> QDQD | C177A | — |
| P3338 | C74S | S197A | KSKR --> QDQD | C177A | — |
| P3339 | C74S | — | — | C177A | C252S |
| P3340 | C74S | — | KSKR --> QDQD | C177A | C252S |
| P3341 | C74S | S197A | KSKR --> QDQD | C177A | C252S |

[0297] Antibody-IL-12 (p35-p40) fusion proteins were generated by fusing an immunoglobulin antigen binding domain (ABD) to the N-terminus of the p35-p40 fusion proteins, as shown in Table E3.

TABLE E3

| | p35 | | | p40 | | |
|---|---|---|---|---|---|---|
| Protein name | ABD Target | Mutants | | Mutants | | |
| P3083 | Non-targeted | C74S | — | QDQD (258-261) | C177A | — |
| P3084 | Non-targeted | C74S | — | QDQD (258-261) | C177A | — |
| P3085 | Non-targeted | C74S | — | QDQD (258-261) | C177A | — |
| P30952158 | FAPa, B7H3 | C74S | — | QDQD (258-261) | C177A | — |
| P30962158 | FAPa, B7H3 | C74S | — | QDQD (258-261) | C177A | — |
| P30972158 | FAPa, B7H3 | C74S | — | QDQD (258-261) | C177A | — |
| P30982158 | FAPa, B7H3 | C74S | — | QDQD (258-261) | C177A | — |
| P30991942 | PD-L1 | C74S | — | QDQD (258-261) | C177A | — |
| P31001942 | PD-L1 | C74S | — | QDQD (258-261) | C177A | — |
| P31011563 | FAPa | C74S | — | QDQD (258-261) | C177A | — |
| P31021563 | FAPa | C74S | — | QDQD (258-261) | C177A | — |
| P32692158 | FAPa, B7H3 | C74S | S197A | QDQD (258-261) | C177A | C252S |
| P32702158 | FAPa, B7H3 | C74S | S197A | QDQD (258-261) | C177A | C252S |
| P32712158 | FAPa, B7H3 | C74S | S197A | QDQD (258-261) | C177A | C252S |
| P32721942 | PD-L1 | C74S | S197A | QDQD (258-261) | C177A | C252S |
| P32731942 | PD-L1 | C74S | S197A | QDQD (258-261) | C177A | C252S |
| P32741942 | PD-L1 | C74S | S197A | QDQD (258-261) | C177A | C252S |

[0298] To generate ABD-p35-p40 fusion proteins with attenuated IL-12R binding activities, various point mutations were introduced at position 167 of p35, based on the construct P32731942 from Table E3 (supra). The design of the attenuated constructs is shown in Table E4.

TABLE E4

| | p35 | | | | P40 | | |
|---|---|---|---|---|---|---|---|
| Protein name | ABD Target | Mutants | | | Mutants | | |
| P32771942 | PD-L1 | C74S | S197A | D188A | QDQD (258-261) | C177A | C252S |
| P32781942 | PD-L1 | C74S | S197A | Y167A | QDQD (258-261) | C177A | C252S |
| P32791942 | PD-L1 | C74S | S197A | Y167D | QDQD (258-261) | C177A | C252S |
| P32801942 | PD-L1 | C74S | S197A | Y167E | QDQD (258-261) | C177A | C252S |
| P32811942 | PD-L1 | C74S | S197A | Y167F | QDQD (258-261) | C177A | C252S |
| P32821942 | PD-L1 | C74S | S197A | Y167G | QDQD (258-261) | C177A | C252S |
| P32831942 | PD-L1 | C74S | S197A | Y167H | QDQD (258-261) | C177A | C252S |
| P32841942 | PD-L1 | C74S | S197A | Y167I | QDQD (258-261) | C177A | C252S |
| P32851942 | PD-L1 | C74S | S197A | Y167L | QDQD (258-261) | C177A | C252S |
| P32861942 | PD-L1 | C74S | S197A | Y167N | QDQD (258-261) | C177A | C252S |
| P32871942 | PD-L1 | C74S | S197A | Y167Q | QDQD (258-261) | C177A | C252S |
| P32881942 | PD-L1 | C74S | S197A | Y167S | QDQD (258-261) | C177A | C252S |
| P32891942 | PD-L1 | C74S | S197A | Y167T | QDQD (258-261) | C177A | C252S |
| P32901942 | PD-L1 | C74S | S197A | Y167V | QDQD (258-261) | C177A | C252S |

[0299] Additional ABD-p35-p40 fusion proteins were generated by fusing a non-targeting (control) ABD to the N-terminus of the p35-p40 fusion proteins, as shown in Table E5.

| Protein | p35 | | | | |
|---|---|---|---|---|---|
| name | ABD Target | Mutants | | | LC |
| P32731563 | PD-L1 | C74S | S197A | — | M85LC |
| P32771563 | PD-L1 | C74S | S197A | D188A | M85LC |
| P32781563 | PD-L1 | C74S | S197A | Y167A | M85LC |
| P32791563 | PD-L1 | C74S | S197A | Y167D | M85LC |
| P32801563 | PD-L1 | C74S | S197A | Y167E | M85LC |
| P32811563 | PD-L1 | C74S | S197A | Y167F | M85LC |
| P32821563 | PD-L1 | C74S | S197A | Y167G | M85LC |
| P32831563 | PD-L1 | C74S | S197A | Y167H | M85LC |
| P32841563 | PD-L1 | C74S | S197A | Y167I | M85LC |
| P32851563 | PD-L1 | C74S | S197A | Y167L | M85LC |
| P32861563 | PD-L1 | C74S | S197A | Y167N | M85LC |
| P32871563 | PD-L1 | C74S | S197A | Y167Q | M85LC |
| P32881563 | PD-L1 | C74S | S197A | Y167S | M85LC |
| P32891563 | PD-L1 | C74S | S197A | Y167T | M85LC |
| P32901563 | PD-L1 | C74S | S197A | Y167V | M85LC |

[0300] Plasmids coding for the fusion proteins were constructed by standard gene synthesis or mutagenesis, and followed by sub-cloning into the pTT5 expression vector.

[0301] Production, purification, and characterization. Fusion proteins were produced by transient transfection in Expi293 cells. His-tagged proteins were purified by one-step purification process of nickel affinity chromatography (GE Healthcare). ABD fusion proteins were purified by a one-step purification of CaptureSelect™ IgG-CH1 Affinity Matrix (ThermoFisher).

[0302] Purified proteins were characterized by SDS-PAGE for purity assessment. Representative SDS-PAGE results of purified proteins are shown in FIGS. 6A-6F. SDS-PAGE gel results of proteins P3189, P3190, P3191, P3192, P3193, P3194, P3195 and P3196 are shown in FIGS. 6A and 6B. Multiple bands are presented on the non-reducing gel (FIG. 6A) for P3194, P3195 and P3196 while one band on the reducing gel (FIG. 6B), indicating abnormal inter-chain di-sulfide bond formation. A higher band between 130 Kd and 170 Kd is observed for P3189 and P3191 (with C74S in p35 and C177A in p40) on a non-reducing gel, indicating inter-chain di-sulfide bond may be formed between C252. One band is present on non-reducing gel for P3190 and P3192.

[0303] Purified proteins were also characterized by high performance liquid chromatography (HPLC) for homogeneity assessment. HPLC analysis was performed using Zenix-C column (Sepax) and Acquity Arc (Agilent) according to the manufacturer's instructions. Representative HPLC results of purified proteins are shown in FIGS. 7A-7H. HPLC results of P3189, P3190, P3193, and P3194 are shown in FIGS. 7A-7D. P3189 and P3190 purified from CH1 column showed a major monomeric peak with a small fraction of aggregation. P3193 and P3194 purified from CH1 column showed much higher percentage of aggregation. These HPLC results are consistent with SDS-PAGE results.

[0304] Functional assay—STAT4 phosphorylation. Human PBMCs were isolated from whole blood on a density gradient with Ficoll-Paque PREMIUM 1.084 (GE, 17-5446-02). Freshly isolated human PBMCs were activated with 0.5 μg/mL immobilized anti-CD3 antibodies for 3 days. Culture medium was RPMI 1640 medium supplemented with 10% FBS and 10,000 U/mL Penicillin-Streptomycin. After 3d of culture, activated PBMCs were washed with complete culture medium twice to remove cytokines in the supernatant and transferred into 96-well plates (3E5 cells per well). The indicated amounts of IL-12 or IL-12 fusion proteins were applied to activated PBMCs for 20 min at 37° C. to induce STAT4 phosphorylation. Cells were fixed immediately with Cytofix Fixation buffer (BD Bioscience, 554655) to preserve the phosphorylation status for 15 min on ice. The cells were stained with CD3 FITC (BD Bioscience, 561807) for 30 min on ice and permeabilized with Phosflow Perm buffer III (BD Bioscience, 558050) for 30 min on ice. Then the cells were stained with p-STAT4 AF647 (BD Bioscience, 562074) for 60 min on ice. Data were acquired using a Beckman CytoFLEX flow cytometer and were analyzed using Flowjo. The percentage of pSTAT4⁺ population in CD3⁺ T cells was plotted against cytokine concentration. Dose-response curve was fitted with Graphpad Prism. Exemplary results are summarized in FIGS. 9A, 9B, 9E, 9F, 9I, 9J, 9K, and 9L. P3190, P32702158, P32712158, and P32732158 show similar activity in STAT4 phosphorylation assays. P32731942 (AtezoABD-p35-p40; Atezolizumab is an anti-PD-L1 antibody) shows higher activity than human IL-12 control. P32811563, P32821563, and P32901563 show attenuated IL-12 activity, and fusion of these p35 mutants (P32811942, P32821942, and P32901942) to an ABD targeted against PD-L1 can restore IL-12 activity partially or completely.

### Example 2

### Engineering and Testing of Attenuated IL-12 Heterodimers

[0305] ABD-p35/ABD-p40 fusion proteins were generated by fusing wild-type or mutant p35 to the C-terminus of an LC or Fd region, and fusing wild-type or mutant p40 to the C-terminus of a corresponding Fd or LC (see FIGS. 5B-5E). The combined immunoglobulin ABD specifically binds to PD-L1. Illustrative proteins of the LC-p35/Fd-p40 formats are P32213218, P32223219, P32233219, P32223220, and P32233220. Illustrative proteins of the Fd-p35/LC-p40 format are P32243227, P32253228, P32253229, P32263228, and P32263229. Table E6 shows the p35 and p40 proteins used for each construct.

TABLE E6

| | p35 | | | p40 | | | |
|---|---|---|---|---|---|---|---|
| — | ABD | Mutants | | ABD | Mutants | | |
| P32213218 | Anti-PD-L1-LC | — | — | Anti-PD-L1-Fd | — | — | C252S |
| P32223219 | Anti-PD-L1-LC | C74S | — | Anti-PD-L1-Fd | — | C177A | C252S |
| P32233219 | Anti-PD-L1-LC | C74S | — | Anti PD-L1-Fd | QDQD (258-261) | C177A | C252S |
| P32223220 | Anti-PD-L1-LC | C74S | Extra A198 | Anti-PD-L1-Fd | — | C177A | C252S |
| P32233220 | Anti-PD-L1-LC | C74S | Extra A198 | Anti-PD-L1-Fd | QDQD (258-261) | C177A | C252S |
| P32243227 | Anti-PD-L1-Fd | — | — | antiPD-L1-LC | — | — | C252S |
| P32253228 | Anti-PD-L1-Fd | C74S | — | Anti-PD-L1-LC | — | C177A | C252S |
| P32253229 | Anti-PD-L1-Fd | C74S | — | Anti-PD-L1-LC | QDQD (258-261) | C177A | C252S |
| P32263228 | Anti-PD-L1-Fd | C74S | Extra A198 | Anti-PD-L1-LC | — | C177A | C252S |
| P32263229 | Anti-PD-L1-Fd | C74S | Extra A198 | Anti-PD-L1-LC | QDQD (258-261) | C177A | C252S |

[0306] To generate ABD-p35/ABD-p40 fusion proteins with attenuated IL-12R binding activities, point mutations were introduced at position 38, 39, 41, 128, 166, or 167 of p35, based on the construct P32233219 from Table E6 (supra). The design of the attenuated constructs is shown in Table E7 and Table E8.

TABLE E7

| Protein | Position | Protein | Position | Protein | Position |
|---|---|---|---|---|---|
| No. | E38 | No. | F39 | No. | P41 |
| P32233395 | A | P32233413 | A | P32233431 | A |
| P32233396 | D | P32233414 | D | P32233432 | D |
| P32233397 | F | P32233415 | E | P32233433 | E |
| P32233398 | G | P32233416 | G | P32233434 | F |
| P32233399 | H | P32233417 | H | P32233435 | G |
| P32233400 | I | P32233418 | I | P32233436 | H |
| P32233401 | K | P32233419 | K | P32233437 | I |
| P32233402 | L | P32233420 | L | P32233438 | K |
| P32233403 | M | P32233421 | M | P32233439 | L |
| P32233404 | N | P32233422 | N | P32233440 | M |
| P32233405 | P | P32233423 | P | P32233441 | N |
| P32233406 | Q | P32233424 | Q | P32233442 | Q |
| P32233407 | R | P32233425 | R | P32233443 | R |
| P32233408 | S | P32233426 | S | P32233444 | S |
| P32233409 | T | P32233427 | T | P32233445 | T |
| P32233410 | V | P32233428 | V | P32233446 | V |
| P32233411 | W | P32233429 | W | P32233447 | W |
| P32233412 | Y | P32233430 | Y | P32233448 | Y |

TABLE E8

| Protein | Position | Protein | Position | Protein | Position |
|---|---|---|---|---|---|
| No. | K128 | No. | F166 | No. | Y167 |
| P32233449 | A | P32233467 | A | P32233342 | A |
| P32233450 | D | P32233468 | D | P32233343 | D |
| P32233451 | E | P32233469 | E | P32233344 | E |
| P32233452 | F | P32233470 | G | P32233345 | F |
| P32233453 | G | P32233471 | H | P32233346 | G |
| P32233454 | H | P32233472 | I | P32233347 | H |
| P32233455 | I | P32233473 | K | P32233348 | I |
| P32233456 | L | P32233474 | L | P32233502 | K |
| P32233457 | M | P32233475 | M | P32233349 | L |
| P32233458 | N | P32233476 | N | P32233503 | M |
| P32233459 | P | P32233477 | P | P32233350 | N |
| P32233460 | Q | P32233478 | Q | P32233504 | P |
| P32233461 | R | P32233479 | R | P32233351 | Q |
| P32233462 | S | P32233480 | S | P32233505 | R |
| P32233463 | T | P32233481 | T | P32233352 | S |
| P32233464 | V | P32233482 | V | P32233353 | T |
| P32233465 | W | P32233483 | W | P32233354 | V |
| P32233466 | Y | P32233484 | Y | P32233506 | W |

[0307] Additional fusion proteins were also generated by fusing p35mut and p40mut to the C-terminus of M85 ABDs (anti-FAPa and B7H-3), nivolumab ABDs (anti-PD-1), muJi110 ABDs (anti-PD-1), or non-targeting control ABDs. The design of these fusion proteins is shown in Table E9, Table E10, Table E11, and Table E12.

TABLE E9

| | p35 | | | p40 | | | |
|---|---|---|---|---|---|---|---|
| Protein No. | ABD | Mutants | | ABD | Mutants | | |
| P33553356 | Anti-FAPa/B7H3-LC | C74S | Y167A | Anti-FAPa/B7H3-Fd | QDQD (258-261) | C177A | C252S |
| P33553357 | Anti-FAPa/B7H3-LC | C74S | Y167D | Anti-FAPa/B7H3-Fd | QDQD (258-261) | C177A | C252S |
| P33553358 | Anti-FAPa/B7H3-LC | C74S | Y167E | Anti-FAPa/B7H3-Fd | QDQD (258-261) | C177A | C252S |
| P33553359 | Anti-FAPa/B7H3-LC | C74S | Y167F | Anti-FAPa/B7H3-Fd | QDQD (258-261) | C177A | C252S |
| P33553360 | Anti-FAPa/B7H3-LC | C74S | Y167G | Anti-FAPa/B7H3-Fd | QDQD (258-261) | C177A | C252S |
| P33553361 | Anti-FAPa/B7H3-LC | C74S | Y167H | Anti-FAPa/B7H3-Fd | QDQD (258-261) | C177A | C252S |
| P33553362 | Anti-FAPa/B7H3-LC | C74S | Y167I | Anti-FAPa/B7H3-Fd | QDQD (258-261) | C177A | C252S |
| P33553363 | Anti-FAPa/B7H3-LC | C74S | Y167L | Anti-FAPa/B7H3-Fd | QDQD (258-261) | C177A | C252S |
| P33553364 | Anti-FAPa/B7H3-LC | C74S | Y167N | Anti-FAPa/B7H3-Fd | QDQD (258-261) | C177A | C252S |
| P33553365 | Anti-FAPa/B7H3-LC | C74S | Y167Q | Anti-FAPa/B7H3-Fd | QDQD (258-261) | C177A | C252S |
| P33553366 | Anti-FAPa/B7H3-LC | C74S | Y167S | Anti-FAPa/B7H3-Fd | QDQD (258-261) | C177A | C252S |
| P33553367 | Anti-FAPa/B7H3-LC | C74S | Y167T | Anti-FAPa/B7H3-Fd | QDQD (258-261) | C177A | C252S |
| P33553368 | Anti-FAPa/B7H3-LC | C74S | Y167V | Anti-FAPa/B7H3-Fd | QDQD (258-261) | C177A | C252S |
| P35123513 | Anti-PD-1-LC | C74S | Y167D | Anti-PD-1-Fd | QDQD (258-261) | C177A | C252S |
| P35123514 | Anti-PD-1-LC | C74S | Y167E | Anti-PD-1-Fd | QDQD (258-261) | C177A | C252S |
| P35123515 | Anti-PD-1-LC | C74S | Y167F | Anti-PD-1-Fd | QDQD (258-261) | C177A | C252S |
| P35163564 | Anti-PD-1-LC | C74S | Y167F | Anti-PD-1-Fd | QDQD (258-261) | C177A | C252S |
| P35173565 | Anti-PD-1-LC | C74S | Y167F | Anti-PD-1-Fd | QDQD (258-261) | C177A | C252S |
| P35183565 | Anti-PD-1-LC | C74S | Y167F | Anti-PD-1-Fd | QDQD (258-261) | C177A | C252S |
| P35193565 | Anti-PD-1-LC | C74S | Y167F | Anti-PD-1-Fd | QDQD (258-261) | C177A | C252S |

TABLE E10

| | p35 | | | p40 | | | |
|---|---|---|---|---|---|---|---|
| Protein No. | Fusion partner | Mutants | | Fusion partner | Mutants | | |
| P33553219 | Anti-PD-L1-LC | C74S | — | Anti-FAPa/B7H3-Fd | QDQD (258-261) | C177A | C252S |
| P33553342 | Anti-PD-L1-LC | C74S | Y167A | Anti-FAPa/B7H3-Fd | QDQD (258-261) | C177A | C252S |
| P33553343 | Anti-PD-L1-LC | C74S | Y167D | Anti-FAPa/B7H3-Fd | QDQD (258-261) | C177A | C252S |
| P33553344 | Anti-PD-L1-LC | C74S | Y167E | Anti-FAPa/B7H3-Fd | QDQD (258-261) | C177A | C252S |
| P33553345 | Anti-PD-L1-LC | C74S | Y167F | Anti-FAPa/B7H3-Fd | QDQD (258-261) | C177A | C252S |

TABLE E11

| | hu-p35 | | hu-p40 | | | |
|---|---|---|---|---|---|---|
| Protein No. | Fusion partner | Mutants | Fusion partner | Mutants | | |
| P36673219 | Anti-PD-L1-LC | C74S | Anti-PD-L1-Fd | QDQD (258-261) | C177A | C252S |
| P36673668 | Anti-PD-L1-LC | C74S | Anti-PD-L1-Fd | QDQD (258-261) | C177A | C252S |
| P36693670 | Anti-FAPa/B7H3-LC | C74S | Anti-FAPa/B7H3-Fd | QDQD (258-261) | C177A | C252S |
| P36693671 | Anti-FAPa/B7H3-LC | C74S | Anti-FAPa/B7H3-Fd | QDQD (258-261) | C177A | C252S |
| P39043906 | Anti-FAPa/B7H3-LC | — | Anti-FAPa/B7H3-Fd | QDQD (258-261) | — | C252S |
| P39043907 | Anti-FAPa/B7H3-LC | — | ALB8-Anti-FAPa/B7H3-Fd | QDQD (258-261) | — | C252S |
| P39053906 | Anti-FAPa/B7H3-LC | — | Anti-FAPa/B7H3-Fd | — | — | C252S |
| P39053907 | Anti-FAPa/B7H3-LC | — | ALB8-Anti-FAPa/B7H3-Fd | — | — | C252S |
| P37133715 | Anti-B7H3-LC | C74S | Anti-B7H3-Fd | QDQD (258-261) | C177A | C252S |
| P37143715 | Anti-B7H3-LC | C74S | Anti-B7H3-Fd | QDQD (258-261) | C177A | C252S |
| P37403715 | Anti-B7H3-LC | C74S | Anti-B7H3-Fd | — | C177A | C252S |
| P37413715 | Anti-B7H3-LC | C74S | Anti-B7H3-Fd | — | C177A | C252S |
| P38143816 | Anti-B7H3-LC | C74S | Anti-B7H3-Fd | QDQD (258-261) | C177A | C252S |
| P38153816 | Anti-B7H3-LC | C74S | Anti-B7H3-Fd | QDQD (258-261) | C177A | C252S |
| P38173819 | Anti-B7H3-LC | — | Anti-B7H3-Fd | — | — | C252S |
| P38183819 | Anti-B7H3-LC | — | Anti-B7H3-Fd | — | — | C252S |
| P37103712 | Anti-PD-L1-LC | C74S | Anti-PD-L1-Fd | QDQD (258-261) | C177A | C252S |
| P37113712 | Anti-PD-L1-LC | C74S | Anti-PD-L1-Fd | QDQD (258-261) | C177A | C252S |
| P37163717 | Anti-B7H3-LC-G4Fc-hole | C74S | Anti-B7H3-Fd-G4Fc-knob | QDQD (258-261) | C177A | C252S |
| P37423717 | Anti-B7H3-LC-G4Fc-hole | C74S | Anti-B7H3-Fd-G4Fc-knob | — | C177A | C252S |
| P37433717 | Anti-B7H3-LC-G4Fc-hole | C74S | Anti-B7H3-Fd-G4Fc-knob | — | C177A | C252S |
| P37633717 | Anti-B7H3-LC-G4Fc-hole | C74S | Anti-B7H3-Fd-G4Fc-knob | — | C177A | C252S |
| P37643717 | Anti-B7H3-LC-G4Fc-hole | C74S | Anti-B7H3-Fd-G4Fc-knob | — | C177A | C252S |

TABLE E12

| | Hu-p35 | | hu-p40 | | | | |
|---|---|---|---|---|---|---|---|
| Protein No. | Fusion partner | Mutants | Fusion Partner | Mutants | | | C-term |
| P40453671 | Anti-FAPa/B7H3-LC | C74S | Anti-FAPa/B7H3-Fd | QDQD (258-261) | C177A | C252S | HAS |
| P40473715 | Anti-B7H3-LC | C74S | Anti-B7H3-Fd | QDQD (258-261) | C177A | C252S | HAS |
| P40463712 | Anti-PD-L1-LC | C74S | Anti-PD-L1-Fd | QDQD (258-261) | C177A | C252S | HAS |

[0308] Production, purification and characterization. ABD-p35/ABD-p40 fusion proteins were produced by transient transfection in Expi293 cells and purified by a one-step purification of CaptureSelect™ IgG-CH1 Affinity Matrix (ThermoFisher).

[0309] Purified proteins were characterized by SDS-PAGE for purity assessment. Representative SDS-PAGE results are shown in FIGS. 6G-6J. SDS-PAGE results of P32213218, P32223219, P32233219, P32223220, and P32233220 are shown in FIGS. 6G and 6H. Multiple bands are presented on the non-reducing gel (FIG. 6G) for P32213218 while one band on the reducing gel (FIG. 8H), indicating abnormal inter-chain di-sulfide bonds formation.

[0310] Purified proteins were also characterized by high performance liquid chromatography (HPLC) for homogeneity assessment. HPLC analysis was performed using Zenix-C column (Sepax) and Acquity Arc (Agilent) according to the manufacturer's instructions. Representative HPLC results were shown in FIGS. 71-7L. P32213218 showed much higher percentage of aggregation compared with P32223219 due to incorrect paring of cysteine residues probably.

[0311] Binding assay—ELISA. The binding activity and specificity of ABD-p35/ABD-p40 fusion proteins were determined by ELISA. Microtitre plates were coated with purified PD-L1 or goat anti-mouse Fc antibody (Sigma) overnight at 4° C. The next day, plates were washed with PBS and blocked with 3% non-fat dry milk in PBS. The B7H3-muFc fusion protein was captured by goat anti-mouse Fc antibody. Serially diluted IL-12 fusion proteins were added for binding to the immobilized antigen. Bound antibodies were detected with peroxidase-conjugated anti-human Fab secondary antibody (Jackson Immunoresearch). Exemplary ELISA results are shown in FIGS. 8A-8C. P32233344 (AtezoABd-p35/p40) bound to PD-L1 in ELISA analysis as shown in FIG. 8A. P33553358 (M85ABD-p35/p40) bound to B7H3 as shown in FIG. 8B. P33553344 (M85Fd-p40/AtezoLC-p35) did not bind to either PD-L1 or B7H3 as shown in FIG. 8C.

[0312] Functional assay—STAT4 phosphorylation. STAT4 phosphorylation assay was performed as described in Example 1. Exemplary results are shown in FIGS. 9C, 9D, 9E, 9F, 9G, 9H, 9M-9Q, and 9R-9S. P32233219 (AtezoABD-p35/p40) showed higher activity than P33553219 (M85Fd-p40/AtezoLC-p35). Some AtezoABD-p35/p40 with a mutation at Y167E, including P32233342, P32233343, P33233344, P32233345, and P32233347, show attenuated IL-12 activity relative to wild type IL-12 protein. No activity was observed for P33553344 (M85Fd-p40/AtezoLC-p35) with the same Y167 mutation as P32233344 in the current STAT4 phosphorylation assay. Lower activity was observed for P33553359 (M85Fab-p35/p40) and P33553345 (M85Fd-p40/AtezoLC-p35) with the same Y167F mutation as in P32233345. FIG. 9Q shows partial STAT4 assay results of F39 mutants with slightly attenuated IL-12 activity and the activity becomes lower without PDL1 targeting. Blocking with Atezo mAb reduces AtezoABD-p35/p40 activity (FIGS. 9R and 9S). Blocking with M85 does not reduce the activity of M85ABD-p35/p40 (FIG. 9S).

[0313] Table E13 below shows the relative activity of exemplary p35 mutants relative to wild-type human IL-12, as measured by phosphorylation of STAT4 in preactivated human PBMCs. % activity of IL-12 is measured by (activity of 100 ng/ml p35 mutants)/(activity of 50 ng/ml IL-12).

TABLE E13

% activity of IL-12

| Protein | Mutant in p35 | Donor A | Donor B |
|---|---|---|---|
| P32233346 | Y167G | 14.70% | 18.72% |
| P32233351 | Y167Q | 7.30% | 5.30% |
| P32233353 | Y167T | 5.02% | 4.48% |
| P32233354 | Y167V | 43.35% | 53.98% |
| P33553342 | Y167A | 5.09% | 3.71% |
| P33553345 | Y167F | 6.05% | 5.96% |
| P33553365 | Y167Q | 10.75% | 10.89% |
| P33553367 | Y167T | 4.98% | 3.14% |
| P33553368 | Y167V | 28.97% | 39.94% |
| P32233395 | E38A | 87.12% | 97.04% |
| P32233396 | E38D | 78.11% | 84.71% |
| P32233397 | E38F | 84.55% | 81.44% |
| P32233398 | E38G | 81.33% | 82.84% |
| P32233399 | E38H | 86.91% | 87.99% |
| P32233400 | E38I | 89.06% | 89.24% |
| P32233401 | E38k | 83.48% | 88.77% |
| P32233402 | E38l | 84.76% | 88.46% |
| P32233403 | E38M | 83.26% | 90.48% |
| P32233404 | E38N | 81.33% | 87.21% |
| P32233405 | E38P | 77.47% | 89.70% |
| P32233406 | E38Q | 90.77% | 92.98% |
| P32233407 | E38R | 75.54% | 84.71% |
| P32233408 | E38S | 86.70% | 91.26% |
| P32233409 | E38T | 89.06% | 92.67% |
| P32233410 | E38V | 87.34% | 92.82% |
| P32233411 | E38W | 80.26% | 87.83% |
| P32233412 | E38Y | 84.76% | 90.64% |
| P32233413 | F39A | 66.95% | 76.29% |
| P32233414 | F39D | 57.08% | 75.20% |
| P32233415 | F39E | 60.94% | 71.76% |
| P32233417 | F39H | 89.27% | 93.92% |
| P32233418 | F39I | 60.94% | 67.71% |
| P32233419 | F39K | 68.45% | 77.07% |
| P32233420 | F39L | 84.12% | 90.64% |
| P32233421 | F39M | 79.83% | 85.65% |
| P32233422 | F39N | 78.11% | 81.12% |
| P32233423 | F39P | 41.63% | 51.33% |
| P32233424 | F39Q | 77.90% | 80.19% |
| P32233425 | F39R | 69.53% | 73.48% |
| P32233426 | F39S | 80.47% | 82.53% |
| P32233427 | F39T | 53.86% | 59.91% |
| P32233428 | F39V | 50.21% | 64.27% |
| P32233429 | F39W | 80.26% | 82.68% |
| P32233430 | F39Y | 95.49% | 88.30% |
| P32233431 | P41A | 83.48% | 84.40% |
| P32233432 | P41D | 78.33% | 76.91% |
| P32233433 | P41E | 48.28% | 57.57% |
| P32233434 | P41F | 39.70% | 45.87% |
| P32233435 | P41G | 83.26% | 81.59% |
| P32233436 | P41H | 62.88% | 65.99% |
| P32233437 | P41I | 67.60% | 60.84% |
| P32233438 | P41K | 71.03% | 75.35% |
| P32233439 | P41L | 57.30% | 54.13% |
| P32233440 | P41M | 70.82% | 75.98% |
| P32233441 | P41N | 56.44% | 66.15% |
| P32233442 | P41Q | 74.68% | 76.44% |
| P32233443 | P41R | 64.38% | 61.93% |
| P32233445 | P41T | 76.39% | 81.59% |
| P32233447 | P41W | 31.33% | 37.91% |
| P32233449 | K128A | 91.20% | 87.36% |
| P32233450 | K128D | 58.80% | 68.49% |
| P32233452 | K128F | 64.16% | 70.36% |
| P32233453 | K128G | 83.91% | 85.96% |
| P32233454 | K128H | 73.18% | 77.69% |
| P32233455 | K128I | 66.31% | 73.17% |
| P32233456 | K128L | 77.25% | 74.73% |
| P32233457 | K128M | 82.40% | 78.78% |
| P32233458 | K128N | 82.19% | 80.66% |
| P32233459 | K128P | 68.67% | 69.73% |
| P32233460 | K128Q | 81.97% | 81.28% |

[0314] Functional assay—IFNγ production. Human PBMCs were isolated and activated as for the STAT4 phosphorylation assay. Activated PBMCs were seeded into 96-well plate at 2E5 cells/well. The indicated amounts of IL-12 or IL-12 fusion proteins were added to achieve a final concentration from 0-10 μg/mL. Cells in the culture medium alone served as controls. After 48 hrs, IL-12-dependent secretion of IFNγ into the supernatant was quantified via ELISA (Biolegend, 430104). Dose-response curve was fitted with Graphpad Prism. Exemplary results are summarized in FIGS. 10A-10D. P32223219 and P32233219 show similar activity in the IFNγ assay and slightly higher activity than huIL-12. P33553219 shows much lower activity without PDL1 targeting. P32233345 with Y167F mutation shows slighter lower activity than huIL-12, but P33553359 and P33553345 show much lower activity without PDL1 targeting. Consistent with pSTAT4 phosphorylation assay, blocking with Atezo mAb reduces AtezoABD-p35/p40 activity (FIGS. 10C-10D).

[0315] Functional assay—IFNγ production in NK92MI. NK92MI cells were seeded into 96-well plate at 2E4 cells/well. The indicated amounts of IL-12 or IL-12 fusion proteins were added into corresponding wells. Cells in the culture medium alone were served as controls. After 48 hrs, IL-12-dependent secretion of IFN-γ into the supernatant was quantified via ELISA (Biolegend, 430104). Dose-response curve was fitted with Graphpad Prism. Exemplary results are summarized in FIGS. 11A-11D. P36673668 (AtezoABD-p35/p40) shows similar activity as IL-12 while P36693671 (M85ABD-p35/p40) shows about 70 fold lower activity compared with IL-12 (FIGS. 11A and 11B). Protease cleavage between Fd and p40 does not improve IL-12 activity. P39043906 and P39053906 (M85ABD-p35/p40) with di-sulfide bond between p35 and p40 show higher activity compared with P36693671.

The application's sequence listing, which the Patent Office published only in electronic form, follows.

SEQUENCE LISTING (198 sequences)

SEQ ID NO: 1 - protein, 219 aa, Homo sapiens
MCPARSLLLVATLVLLDHLSLARNLPVATPDPGMFPCLHHSQNLLRAVSNMLQKARQTLEFYPCTSEEIDHEDITKDKTSTVEACLPLELTKNESCLNSRETSFITNGSCLASRKTSFMMALCLSSIYEDLKMYQVEFKTMNAKLLMDPKRQIFLDQNMLAVIDELMQALNFNSETVPQKSSLEEPDFYKTKIKLCILLHAFRIRAVTIDRVMSYLNAS

SEQ ID NO: 2 - protein, 197 aa, Homo sapiens
RNLPVATPDPGMFPCLHHSQNLLRAVSNMLQKARQTLEFYPCTSEEIDHEDITKDKTSTVEACLPLELTKNESCLNSRETSFITNGSCLASRKTSFMMALCLSSIYEDLKMYQVEFKTMNAKLLMDPKRQIFLDQNMLAVIDELMQALNFNSETVPQKSSLEEPDFYKTKIKLCILLHAFRIRAVTIDRVMSYLNAS

SEQ ID NO: 3 - protein, 197 aa, Artificial Sequence
  Substituted human IL-12A variant
RNLPVATPDPGMFPCLHHSQNLLRAVSNMLQKARQTLEFYPCTSEEIDHEDITKDKTSTVEACLPLELTKNESSLNSRETSFITNGSCLASRKTSFMMALCLSSIYEDLKMYQVEFKTMNAKLLMDPKRQIFLDQNMLAVIDELMQALNFNSETVPQKSSLEEPDFYKTKIKLCILLHAFRIRAVTIDRVMSYLNAS

SEQ ID NO: 4 - protein, 197 aa, Artificial Sequence
  Substituted human IL-12A variant
RNLPVATPDPGMFPCLHHSQNLLRAVSNMLQKARQTLEFYPCTSEEIDHEDITKDKTSTVEACLPLELTKNESALNSRETSFITNGSCLASRKTSFMMALCLSSIYEDLKMYQVEFKTMNAKLLMDPKRQIFLDQNMLAVIDELMQALNFNSETVPQKSSLEEPDFYKTKIKLCILLHAFRIRAVTIDRVMSYLNAS

SEQ ID NO: 5 - protein, 197 aa, Artificial Sequence
  Substituted human IL-12A variant
RNLPVATPDPGMFPCLHHSQNLLRAVSNMLQKARQTLEFYPCTSEEIDHEDITKDKTSTVEACLPLELTKNESSLNSRETSFITNGSCLASRKTSFMMALCLSSIYEDLKMYQVEFKTMNAKLLMDPKRQIFLDQNMLAVIDELMQALNFNSETVPQKSSLEEPDFYKTKIKLCILLHAFRIRAVTIDRVMSYLNAA

SEQ ID NO: 6 - protein, 197 aa, Artificial Sequence
  Substituted human IL-12A variant
RNLPVATPDPGMFPCLHHSQNLLRAVSNMLQKARQTLEFYPCTSEEIDHEDITKDKTSTVEACLPLELTKNESSLNSRETSFITNGSCLASRKTSFMMALCLSSIYEDLKMYQVEFKTMNAKLLMDPKRQIFLDQNMLAVIDELMQALNFNSETVPQKSSLEEPDFYKTKIKLCILLHAFRIRAVTIARVMSYLNAA

SEQ ID NO: 7 - protein, 197 aa, Artificial Sequence
  Substituted human IL-12A variant
RNLPVATPDPGMFPCLHHSQNLLRAVSNMLQKARQTLEFYPCTSEEIDHEDITKDKTSTVEACLPLELTKNESSLNSRETSFITNGSCLASRKTSFMMALCLSSIYEDLKMYQVEFKTMNAKLLMDPKRQIFLDQNMLAVIDELMQALNFNSETVPQKSSLEEPDFAKTKIKLCILLHAFRIRAVTIDRVMSYLNAA

SEQ ID NO: 8 - protein, 197 aa, Artificial Sequence
  Substituted human IL-12A variant
RNLPVATPDPGMFPCLHHSQNLLRAVSNMLQKARQTLEFYPCTSEEIDHEDITKDKTSTVEACLPLELTKNESSLNSRETSFITNGSCLASRKTSFMMALCLSSIYEDLKMYQVEFKTMNAKLLMDPKRQIFLDQNMLAVIDELMQALNFNSETVPQKSSLEEPDFDKTKIKLCILLHAFRIRAVTIDRVMSYLNAA

SEQ ID NO: 9 - protein, 328 aa, Homo sapiens
MCHQQLVISWFSLVFLASPLVAIWELKKDVYVVELDWYPDAPGEMVVLTCDTPEEDGITWTLDQSSEVLGSGKTLTIQVKEFGDAGQYTCHKGGEVLSHSLLLLHKKEDGIWSTDILKDQKEPKNKTFLRCEAKNYSGRFTCWWLTTISTDLTFSVKSSRGSSDPQGVTCGAATLSAERVRGDNKEYEYSVECQEDSACPAAEESLPIEVMVDAVHKLKYENYTSSFFIRDIIKPDPPKNLQLKPLKNSRQVEVSWEYPDTWSTPHSYFSLTFCVQVQGKSKREKKDRVFTDKTSATVICRKNASISVRAQDRYYSSSWSEWASVPCS

SEQ ID NO: 10 - protein, 306 aa, Homo sapiens
IWELKKDVYVVELDWYPDAPGEMVVLTCDTPEEDGITWTLDQSSEVLGSGKTLTIQVKEFGDAGQYTCHKGGEVLSHSLLLLHKKEDGIWSTDILKDQKEPKNKTFLRCEAKNYSGRFTCWWLTTISTDLTFSVKSSRGSSDPQGVTCGAATLSAERVRGDNKEYEYSVECQEDSACPAAEESLPIEVMVDAVHKLKYENYTSSFFIRDIIKPDPPKNLQLKPLKNSRQVEVSWEYPDTWSTPHSYFSLTFCVQVQGKSKREKKDRVFTDKTSATVICRKNASISVRAQDRYYSSSWSEWASVPCS

SEQ ID NO: 11 - protein, 306 aa, Artificial Sequence
  Substituted human IL-12B variant
IWELKKDVYVVELDWYPDAPGEMVVLTCDTPEEDGITWTLDQSSEVLGSGKTLTIQVKEFGDAGQYTCHKGGEVLSHSLLLLHKKEDGIWSTDILKDQKEPKNKTFLRCEAKNYSGRFTCWWLTTISTDLTFSVKSSRGSSDPQGVTCGAATLSAERVRGDNKEYEYSVECQEDSACPAAEESLPIEVMVDAVHKLKYENYTSSFFIRDIIKPDPPKNLQLKPLKNSRQVEVSWEYPDTWSTPHSYFSLTFCVQVQGQDQDEKKDRVFTDKTSATVICRKNASISVRAQDRYYSSSWSEWASVPCS

SEQ ID NO: 12 - protein, 306 aa, Artificial Sequence
  Substituted human IL-12B variant
IWELKKDVYVVELDWYPDAPGEMVVLTCDTPEEDGITWTLDQSSEVLGSGKTLTIQVKEFGDAGQYTCHKGGEVLSHSLLLLHKKEDGIWSTDILKDQKEPKNKTFLRCEAKNYSGRFTCWWLTTISTDLTFSVKSSRGSSDPQGVTCGAATLSAERVRGDNKEYEYSVECQEDSAAPAAEESLPIEVMVDAVHKLKYENYTSSFFIRDIIKPDPPKNLQLKPLKNSRQVEVSWEYPDTWSTPHSYFSLTFCVQVQGQDQDEKKDRVFTDKTSATVICRKNASISVRAQDRYYSSSWSEWASVPCS

SEQ ID NO: 13 - protein, 306 aa, Artificial Sequence
  Substituted human IL-12B variant
IWELKKDVYVVELDWYPDAPGEMVVLTCDTPEEDGITWTLDQSSEVLGSGKTLTIQVKEFGDAGQYTCHKGGEVLSHSLLLLHKKEDGIWSTDILKDQKEPKNKTFLRCEAKNYSGRFTCWWLTTISTDLTFSVKSSRGSSDPQGVTCGAATLSAERVRGDNKEYEYSVECQEDSAAPAAEESLPIEVMVDAVHKLKYENYTSSFFIRDIIKPDPPKNLQLKPLKNSRQVEVSWEYPDTWSTPHSYFSLTFCVQVQGQDQDEKKDRVFTDKTSATVICRKNASISVRAQARYYSSSWSEWASVPCS

SEQ ID NO: 14 - protein, 305 aa, Artificial Sequence
  Substituted human IL-12B variant
IWELKKDVYVVELDWYPDAPGEMVVLTCDTPEEDGITWTLDQSSEVLGSGKTLTIQVKEFGDAGQYTCHKGGEVLSHSLLLLHKKEDGIWSTDILKDQKEPKNKTFLRCEAKNFSGRFTCWWLTTISTDLTFSVKSSRGSSDPQGVTCGAATLSAERVRGDNKEYEYSVECQEDSAAPAAEESLPIEVMVDAVHKLKYENYTSSFFIRDIIKPDPPKNLQLKPLKNSRQVEVSWEYPDTWSTPHSYFSLTFCVQVQGQDQDEKKDRVFTDKTSATVICRKNASISVRAQDRYYSSSWSEWASVPC

SEQ ID NO: 15 - protein, 306 aa, Artificial Sequence
  Substituted human IL-12B variant
IWELKKDVYVVELDWYPDAPGEMVVLTCDTPEEDGITWTLDQSSEVLGSGKTLTIQVKEFGDAGQYTCHKGGEVLSHSLLLLHKKEDGIWSTDILKDQKEPKNKTFLRCEAKNYSGRFTCWWLTTISTDLTFSVKSSRGSSDPQGVTCGAATLSAERVRGDNKEYEYSVECQEDSAAPAAEESLPIEVMVDAVHKLKYENYTSSFFIRDIIKPDPPKNLQLKPLKNSRQVEVSWEYPDTWSTPHSYFSLTFSVQVQGQDQDEKKDRVFTDKTSATVICRKNASISVRAQDRYYSSSWSEWASVPCS

SEQ ID NO: 16 - protein, 306 aa, Artificial Sequence
  Substituted human IL-12B variant
IWELKKDVYVVELDWYPDAPGEMVVLTCDTPEEDGITWTLDQSSEVLGSGKTLTIQVKEFGDAGQYTCHKGGEVLSHSLLLLHKKEDGIWSTDILKDQKEPKNKTFLRCEAKNYSGRFTCWWLTTISTDLTFSVKSSRGSSDPQGVTCGAATLSAERVRGDNKEYEYSVECQEDSAAPAAEESLPIEVMVDAVHKLKYENYTSSFFIRDIIKPDPPKNLQLKPLKNSRQVEVSWEYPDTWSTPHSYFSLTFCVQVQGKSKREKKDRVFTDKTSATVICRKNASISVRAQDRYYSSSWSEWASVPCS

SEQ ID NO: 17 - protein, 306 aa, Artificial Sequence
  Substituted human IL-12B variant
IWELKKDVYVVELDWYPDAPGEMVVLTCDTPEEDGITWTLDQSSEVLGSGKTLTIQVKEFGDAGQYTCHKGGEVLSHSLLLLHKKEDGIWSTDILKDQKEPKNKTFLRCEAKNYSGRFTCWWLTTISTDLTFSVKSSRGSSDPQGVTCGAATLSAERVRGDNKEYEYSVECQEDSAAPAAEESLPIEVMVDAVHKLKYENYTSSFFIRDIIKPDPPKNLQLKPLKNSRQVEVSWEYPDTWSTPHSYFSLTFSVQVQGKSKREKKDRVFTDKTSATVICRKNASISVRAQDRYYSSSWSEWASVPCS

SEQ ID NO: 18 - protein, 306 aa, Artificial Sequence
  Substituted human IL-12B variant
IWELKKDVYVVELDWYPDAPGEMVVLTCDTPEEDGITWTLDQSSEVLGSGKTLTIQVKEFGDAGQYTCHKGGEVLSHSLLLLHKKEDGIWSTDILKDQKEPKNKTFLRCEAKNYSGRFTCWWLTTISTDLTFSVKSSRGSSDPQGVTCGAATLSAERVRGDNKEYEYSVECQEDSACPAAEESLPIEVMVDAVHKLKYENYTSSFFIRDIIKPDPPKNLQLKPLKNSRQVEVSWEYPDTWSTPHSYFSLTFSVQVQGQDQDEKKDRVFTDKTSATVICRKNASISVRAQDRYYSSSWSEWASVPCS

SEQ ID NO: 19 - protein, 306 aa, Artificial Sequence
  Substituted human IL-12B variant
IWELKKDVYVVELDWYPDAPGEMVVLTCDTPEEDGITWTLDQSSEVLGSGKTLTIQVKEFGDAGQYTCHKGGEVLSHSLLLLHKKEDGIWSTDILKDQKEPKNKTFLRCEAKNYSGRFTCWWLTTISTDLTFSVKSSRGSSDPQGVTCGAATLSAERVRGDNKEYEYSVECQEDSACPAAEESLPIEVMVDAVHKLKYENYTSSFFIRDIIKPDPPKNLQLKPLKNSRQVEVSWEYPDTWSTPHSYFSLTFSVQVQGKSKREKKDRVFTDKTSATVICRKNASISVRAQDRYYSSSWSEWASVPCS

SEQ ID NO: 20 - protein, 4 aa, Artificial Sequence
  Peptide linker sequence
GSGS

SEQ ID NO: 21 - protein, 4 aa, Artificial Sequence
  Peptide linker sequence
GGSG

SEQ ID NO: 22 - protein, 4 aa, Artificial Sequence
  Peptide linker sequence
GGGS

SEQ ID NO: 23 - protein, 5 aa, Artificial Sequence
  Peptide linker sequence
GSGGG

SEQ ID NO: 24 - protein, 5 aa, Artificial Sequence
  Peptide linker sequence
GGGGS

SEQ ID NO: 25 - protein, 4 aa, Artificial Sequence
  Peptide linker sequence
GNGN

SEQ ID NO: 26 - protein, 4 aa, Artificial Sequence
  Peptide linker sequence
GGNG

SEQ ID NO: 27 - protein, 4 aa, Artificial Sequence
  Peptide linker sequence
GGGN

SEQ ID NO: 28 - protein, 5 aa, Artificial Sequence
  Peptide linker sequence
GGGGN

SEQ ID NO: 29 - protein, 5 aa, Artificial Sequence
  Peptide linker sequence
DGGGS

SEQ ID NO: 30 - protein, 5 aa, Artificial Sequence
  Peptide linker sequence
TGEKP

SEQ ID NO: 31 - protein, 4 aa, Artificial Sequence
  Peptide linker sequence
GGRR

SEQ ID NO: 32 - protein, 14 aa, Artificial Sequence
  Peptide linker sequence
EGKSSGSGSESKVD

SEQ ID NO: 33 - protein, 18 aa, Artificial Sequence
  Peptide linker sequence
KESGSVSSEQLAQFRSLD

SEQ ID NO: 34 - protein, 8 aa, Artificial Sequence
  Peptide linker sequence
GGRRGGGS

SEQ ID NO: 35 - protein, 9 aa, Artificial Sequence
  Peptide linker sequence
LRQRDGERP

SEQ ID NO: 36 - protein, 12 aa, Artificial Sequence
  Peptide linker sequence
LRQKDGGGSERP

SEQ ID NO: 37 - protein, 16 aa, Artificial Sequence
  Peptide linker sequence
LRQKDGGGSGGGSERP

SEQ ID NO: 38 - protein, 15 aa, Artificial Sequence
  Peptide linker sequence
GGGGENLYFQGGGGS

SEQ ID NO: 39 - protein, 20 aa, Artificial Sequence
  Peptide linker sequence
GGGGSENLYFQGGGSGGGGS

SEQ ID NO: 40 - protein, 12 aa, Artificial Sequence
  Peptide linker sequence
GGSPLGLAGGGS

SEQ ID NO: 41 - protein, 21 aa, Artificial Sequence
  Peptide linker sequence
GGSGGPLGLAGSGRSDNRGGA

SEQ ID NO: 42 - protein, 25 aa, Artificial Sequence
  Peptide linker sequence
GGGGSGGGGSENLYFQGGGSGGGGS

SEQ ID NO: 43 - protein, 25 aa, Artificial Sequence
  Peptide linker sequence
GGGGSPLGLAGSGRSDNRGSGGGGS

SEQ ID NO: 44 - protein, 5 aa, Artificial Sequence
  Cleavable peptide linker sequence
PLGLA

SEQ ID NO: 45 - protein, 6 aa, Artificial Sequence
  Cleavable peptide linker sequence
GPLGVR

SEQ ID NO: 46 - protein, 7 aa, Artificial Sequence
  Cleavable peptide linker sequence
SGRSDNH

SEQ ID NO: 47 - protein, 7 aa, Artificial Sequence
  Cleavable peptide linker sequence
SGRSDNQ

SEQ ID NO: 48 - protein, 7 aa, Artificial Sequence
  Cleavable peptide linker sequence
SGRSDNR

SEQ ID NO: 49 - protein, 7 aa, Artificial Sequence
  Cleavable peptide linker sequence
SGRSDNS

SEQ ID NO: 50 - protein, 7 aa, Artificial Sequence
  Cleavable peptide linker sequence
SGRSDNT

SEQ ID NO: 51 - protein, 518 aa, Artificial Sequence
  Made in Lab - attenuated protein homodimer construct
RNLPVATPDPGMFPCLHHSQNLLRAVSNMLQKARQTLEFYPCTSEEIDHEDITKDKTSTVEACLPLELTKNESCLNSRETSFITNGSCLASRKTSFMMALCLSSIYEDLKMYQVEFKTMNAKLLMDPKRQIFLDQNMLAVIDELMQALNFNSETVPQKSSLEEPDFYKTKIKLCILLHAFRIRAVTIDRVMSYLNASGGGGENLYFQGGGGSIWELKKDVYVVELDWYPDAPGEMVVLTCDTPEEDGITWTLDQSSEVLGSGKTLTIQVKEFGDAGQYTCHKGGEVLSHSLLLLHKKEDGIWSTDILKDQKEPKNKTFLRCEAKNYSGRFTCWWLTTISTDLTFSVKSSRGSSDPQGVTCGAATLSAERVRGDNKEYEYSVECQEDSACPAAEESLPIEVMVDAVHKLKYENYTSSFFIRDIIKPDPPKNLQLKPLKNSRQVEVSWEYPDTWSTPHSYFSLTFCVQVQGQDQDEKKDRVFTDKTSATVICRKNASISVRAQDRYYSSSWSEWASVPCS

SEQ ID NO: 52 - protein, 523 aa, Artificial Sequence
  Made in Lab - attenuated protein homodimer construct
RNLPVATPDPGMFPCLHHSQNLLRAVSNMLQKARQTLEFYPCTSEEIDHEDITKDKTSTVEACLPLELTKNESCLNSRETSFITNGSCLASRKTSFMMALCLSSIYEDLKMYQVEFKTMNAKLLMDPKRQIFLDQNMLAVIDELMQALNFNSETVPQKSSLEEPDFYKTKIKLCILLHAFRIRAVTIDRVMSYLNASGGGGSENLYFQGGGSGGGGSIWELKKDVYVVELDWYPDAPGEMVVLTCDTPEEDGITWTLDQSSEVLGSGKTLTIQVKEFGDAGQYTCHKGGEVLSHSLLLLHKKEDGIWSTDILKDQKEPKNKTFLRCEAKNYSGRFTCWWLTTISTDLTFSVKSSRGSSDPQGVTCGAATLSAERVRGDNKEYEYSVECQEDSACPAAEESLPIEVMVDAVHKLKYENYTSSFFIRDIIKPDPPKNLQLKPLKNSRQVEVSWEYPDTWSTPHSYFSLTFCVQVQGQDQDEKKDRVFTDKTSATVICRKNASISVRAQDRYYSSSWSEWASVPCS

SEQ ID NO: 53 - protein, 528 aa, Artificial Sequence
  Made in Lab - attenuated protein homodimer construct
RNLPVATPDPGMFPCLHHSQNLLRAVSNMLQKARQTLEFYPCTSEEIDHEDITKDKTSTVEACLPLELTKNESCLNSRETSFITNGSCLASRKTSFMMALCLSSIYEDLKMYQVEFKTMNAKLLMDPKRQIFLDQNMLAVIDELMQALNFNSETVPQKSSLEEPDFYKTKIKLCILLHAFRIRAVTIDRVMSYLNASGGGGSGGGGSENLYFQGGGSGGGGSIWELKKDVYVVELDWYPDAPGEMVVLTCDTPEEDGITWTLDQSSEVLGSGKTLTIQVKEFGDAGQYTCHKGGEVLSHSLLLLHKKEDGIWSTDILKDQKEPKNKTFLRCEAKNYSGRFTCWWLTTISTDLTFSVKSSRGSSDPQGVTCGAATLSAERVRGDNKEYEYSVECQEDSACPAAEESLPIEVMVDAVHKLKYENYTSSFFIRDIIKPDPPKNLQLKPLKNSRQVEVSWEYPDTWSTPHSYFSLTFCVQVQGQDQDEKKDRVFTDKTSATVICRKNASISVRAQDRYYSSSWSEWASVPCS

SEQ ID NO: 54 - protein, 518 aa, Artificial Sequence
  Made in Lab - attenuated protein homodimer construct
RNLPVATPDPGMFPCLHHSQNLLRAVSNMLQKARQTLEFYPCTSEEIDHEDITKDKTSTVEACLPLELTKNESSLNSRETSFITNGSCLASRKTSFMMALCLSSIYEDLKMYQVEFKTMNAKLLMDPKRQIFLDQNMLAVIDELMQALNFNSETVPQKSSLEEPDFYKTKIKLCILLHAFRIRAVTIDRVMSYLNASGGGGENLYFQGGGGSIWELKKDVYVVELDWYPDAPGEMVVLTCDTPEEDGITWTLDQSSEVLGSGKTLTIQVKEFGDAGQYTCHKGGEVLSHSLLLLHKKEDGIWSTDILKDQKEPKNKTFLRCEAKNYSGRFTCWWLTTISTDLTFSVKSSRGSSDPQGVTCGAATLSAERVRGDNKEYEYSVECQEDSAAPAAEESLPIEVMVDAVHKLKYENYTSSFFIRDIIKPDPPKNLQLKPLKNSRQVEVSWEYPDTWSTPHSYFSLTFCVQVQGQDQDEKKDRVFTDKTSATVICRKNASISVRAQDRYYSSSWSEWASVPCS

SEQ ID NO: 55 - protein, 523 aa, Artificial Sequence
  Made in Lab - attenuated protein homodimer construct
RNLPVATPDPGMFPCLHHSQNLLRAVSNMLQKARQTLEFYPCTSEEIDHEDITKDKTSTVEACLPLELTKNESSLNSRETSFITNGSCLASRKTSFMMALCLSSIYEDLKMYQVEFKTMNAKLLMDPKRQIFLDQNMLAVIDELMQALNFNSETVPQKSSLEEPDFYKTKIKLCILLHAFRIRAVTIDRVMSYLNASGGGGSENLYFQGGGSGGGGSIWELKKDVYVVELDWYPDAPGEMVVLTCDTPEEDGITWTLDQSSEVLGSGKTLTIQVKEFGDAGQYTCHKGGEVLSHSLLLLHKKEDGIWSTDILKDQKEPKNKTFLRCEAKNYSGRFTCWWLTTISTDLTFSVKSSRGSSDPQGVTCGAATLSAERVRGDNKEYEYSVECQEDSAAPAAEESLPIEVMVDAVHKLKYENYTSSFFIRDIIKPDPPKNLQLKPLKNSRQVEVSWEYPDTWSTPHSYFSLTFCVQVQGQDQDEKKDRVFTDKTSATVICRKNASISVRAQDRYYSSSWSEWASVPCS

SEQ ID NO: 56 - protein, 528 aa, Artificial Sequence
  Made in Lab - attenuated protein homodimer construct
RNLPVATPDPGMFPCLHHSQNLLRAVSNMLQKARQTLEFYPCTSEEIDHEDITKDKTSTVEACLPLELTKNESSLNSRETSFITNGSCLASRKTSFMMALCLSSIYEDLKMYQVEFKTMNAKLLMDPKRQIFLDQNMLAVIDELMQALNFNSETVPQKSSLEEPDFYKTKIKLCILLHAFRIRAVTIDRVMSYLNASGGGGSGGGGSENLYFQGGGSGGGGSIWELKKDVYVVELDWYPDAPGEMVVLTCDTPEEDGITWTLDQSSEVLGSGKTLTIQVKEFGDAGQYTCHKGGEVLSHSLLLLHKKEDGIWSTDILKDQKEPKNKTFLRCEAKNYSGRFTCWWLTTISTDLTFSVKSSRGSSDPQGVTCGAATLSAERVRGDNKEYEYSVECQEDSAAPAAEESLPIEVMVDAVHKLKYENYTSSFFIRDIIKPDPPKNLQLKPLKNSRQVEVSWEYPDTWSTPHSYFSLTFCVQVQGQDQDEKKDRVFTDKTSATVICRKNASISVRAQDRYYSSSWSEWASVPCS

SEQ ID NO: 57 - protein, 518 aa, Artificial Sequence
  Made in Lab - attenuated protein homodimer construct
RNLPVATPDPGMFPCLHHSQNLLRAVSNMLQKARQTLEFYPCTSEEIDHEDITKDKTSTVEACLPLELTKNESSLNSRETSFITNGSCLASRKTSFMMALCLSSIYEDLKMYQVEFKTMNAKLLMDPKRQIFLDQNMLAVIDELMQALNFNSETVPQKSSLEEPDFYKTKIKLCILLHAFRIRAVTIDRVMSYLNASGGGGENLYFQGGGGSIWELKKDVYVVELDWYPDAPGEMVVLTCDTPEEDGITWTLDQSSEVLGSGKTLTIQVKEFGDAGQYTCHKGGEVLSHSLLLLHKKEDGIWSTDILKDQKEPKNKTFLRCEAKNFSGRFTCWWLTTISTDLTFSVKSSRGSSDPQGVTCGAATLSAERVRGDNKEYEYSVECQEDSAAPAAEESLPIEVMVDAVHKLKYENYTSSFFIRDIIKPDPPKNLQLKPLKNSRQVEVSWEYPDTWSTPHSYFSLTFCVQVQGQDQDEKKDRVFTDKTSATVICRKNASISVRAQDRYYSSSWSEWASVPCS

SEQ ID NO: 58 - protein, 523 aa, Artificial Sequence
  Made in Lab - attenuated protein homodimer construct
RNLPVATPDPGMFPCLHHSQNLLRAVSNMLQKARQTLEFYPCTSEEIDHEDITKDKTSTVEACLPLELTKNESSLNSRETSFITNGSCLASRKTSFMMALCLSSIYEDLKMYQVEFKTMNAKLLMDPKRQIFLDQNMLAVIDELMQALNFNSETVPQKSSLEEPDFYKTKIKLCILLHAFRIRAVTIDRVMSYLNASGGGGSENLYFQGGGSGGGGSIWELKKDVYVVELDWYPDAPGEMVVLTCDTPEEDGITWTLDQSSEVLGSGKTLTIQVKEFGDAGQYTCHKGGEVLSHSLLLLHKKEDGIWSTDILKDQKEPKNKTFLRCEAKNFSGRFTCWWLTTISTDLTFSVKSSRGSSDPQGVTCGAATLSAERVRGDNKEYEYSVECQEDSAAPAAEESLPIEVMVDAVHKLKYENYTSSFFIRDIIKPDPPKNLQLKPLKNSRQVEVSWEYPDTWSTPHSYFSLTFCVQVQGQDQDEKKDRVFTDKTSATVICRKNASISVRAQDRYYSSSWSEWASVPCS

SEQ ID NO: 59 - protein, 528 aa, Artificial Sequence
  Made in Lab - attenuated protein homodimer construct
RNLPVATPDPGMFPCLHHSQNLLRAVSNMLQKARQTLEFYPCTSEEIDHEDITKDKTSTVEACLPLELTKNESSLNSRETSFITNGSCLASRKTSFMMALCLSSIYEDLKMYQVEFKTMNAKLLMDPKRQIFLDQNMLAVIDELMQALNFNSETVPQKSSLEEPDFYKTKIKLCILLHAFRIRAVTIDRVMSYLNASGGGGSGGGGSENLYFQGGGSGGGGSIWELKKDVYVVELDWYPDAPGEMVVLTCDTPEEDGITWTLDQSSEVLGSGKTLTIQVKEFGDAGQYTCHKGGEVLSHSLLLLHKKEDGIWSTDILKDQKEPKNKTFLRCEAKNFSGRFTCWWLTTISTDLTFSVKSSRGSSDPQGVTCGAATLSAERVRGDNKEYEYSVECQEDSAAPAAEESLPIEVMVDAVHKLKYENYTSSFFIRDIIKPDPPKNLQLKPLKNSRQVEVSWEYPDTWSTPHSYFSLTFCVQVQGQDQDEKKDRVFTDKTSATVICRKNASISVRAQDRYYSSSWSEWASVPCS

SEQ ID NO: 60 - protein, 761 aa, Artificial Sequence
  Made in Lab - attenuated protein homodimer construct
EPKSSDKTHTCPPCPAPEAAGGPSVFLFPPKPKDTLMISRTPEVTCVVVDVSHEDPEVKFNWYVDGVEVHNAKTKPREEQYNSTYRVVSVLTVLHQDWLNGKEYKCKVSNKALAAPIEKTISKAKGQPREPQVYTLPPSRDELTKNQVSLTCLVKGFYPSDIAVEWESNGQPENNYKTTPPVLDSDGSFFLYSKLTVDKSRWQQGNVFSCSVMHEALHNHYTQKSLSLSPGGGSPLGLAGGGSRNLPVATPDPGMFPCLHHSQNLLRAVSNMLQKARQTLEFYPCTSEEIDHEDITKDKTSTVEACLPLELTKNESSLNSRETSFITNGSCLASRKTSFMMALCLSSIYEDLKMYQVEFKTMNAKLLMDPKRQIFLDQNMLAVIDELMQALNFNSETVPQKSSLEEPDFYKTKIKLCILLHAFRIRAVTIDRVMSYLNASGGGGENLYFQGGGGSIWELKKDVYVVELDWYPDAPGEMVVLTCDTPEEDGITWTLDQSSEVLGSGKTLTIQVKEFGDAGQYTCHKGGEVLSHSLLLLHKKEDGIWSTDILKDQKEPKNKTFLRCEAKNYSGRFTCWWLTTISTDLTFSVKSSRGSSDPQGVTCGAATLSAERVRGDNKEYEYSVECQEDSAAPAAEESLPIEVMVDAVHKLKYENYTSSFFIRDIIKPDPPKNLQLKPLKNSRQVEVSWEYPDTWSTPHSYFSLTFCVQVQGQDQDEKKDRVFTDKTSATVICRKNASISVRAQDRYYSSSWSEWASVPCS

SEQ ID NO: 61 - protein, 766 aa, Artificial Sequence
  Made in Lab - attenuated protein homodimer construct
EPKSSDKTHTCPPCPAPEAAGGPSVFLFPPKPKDTLMISRTPEVTCVVVDVSHEDPEVKFNWYVDGVEVHNAKTKPREEQYNSTYRVVSVLTVLHQDWLNGKEYKCKVSNKALAAPIEKTISKAKGQPREPQVYTLPPSRDELTKNQVSLTCLVKGFYPSDIAVEWESNGQPENNYKTTPPVLDSDGSFFLYSKLTVDKSRWQQGNVFSCSVMHEALHNHYTQKSLSLSPGGGSPLGLAGGGSRNLPVATPDPGMFPCLHHSQNLLRAVSNMLQKARQTLEFYPCTSEEIDHEDITKDKTSTVEACLPLELTKNESSLNSRETSFITNGSCLASRKTSFMMALCLSSIYEDLKMYQVEFKTMNAKLLMDPKRQIFLDQNMLAVIDELMQALNFNSETVPQKSSLEEPDFYKTKIKLCILLHAFRIRAVTIDRVMSYLNASGGGGSENLYFQGGGSGGGGSIWELKKDVYVVELDWYPDAPGEMVVLTCDTPEEDGITWTLDQSSEVLGSGKTLTIQVKEFGDAGQYTCHKGGEVLSHSLLLLHKKEDGIWSTDILKDQKEPKNKTFLRCEAKNYSGRFTCWWLTTISTDLTFSVKSSRGSSDPQGVTCGAATLSAERVRGDNKEYEYSVECQEDSAAPAAEESLPIEVMVDAVHKLKYENYTSSFFIRDIIKPDPPKNLQLKPLKNSRQVEVSWEYPDTWSTPHSYFSLTFCVQVQGQDQDEKKDRVFTDKTSATVICRKNASISVRAQDRYYSSSWSEWASVPCS

SEQ ID NO: 62 - protein, 771 aa, Artificial Sequence
  Made in Lab - attenuated protein homodimer construct
EPKSSDKTHTCPPCPAPEAAGGPSVFLFPPKPKDTLMISRTPEVTCVVVDVSHEDPEVKFNWYVDGVEVHNAKTKPREEQYNSTYRVVSVLTVLHQDWLNGKEYKCKVSNKALAAPIEKTISKAKGQPREPQVYTLPPSRDELTKNQVSLTCLVKGFYPSDIAVEWESNGQPENNYKTTPPVLDSDGSFFLYSKLTVDKSRWQQGNVFSCSVMHEALHNHYTQKSLSLSPGGGSPLGLAGGGSRNLPVATPDPGMFPCLHHSQNLLRAVSNMLQKARQTLEFYPCTSEEIDHEDITKDKTSTVEACLPLELTKNESSLNSRETSFITNGSCLASRKTSFMMALCLSSIYEDLKMYQVEFKTMNAKLLMDPKRQIFLDQNMLAVIDELMQALNFNSETVPQKSSLEEPDFYKTKIKLCILLHAFRIRAVTIDRVMSYLNASGGGGSGGGGSENLYFQGGGSGGGGSIWELKKDVYVVELDWYPDAPGEMVVLTCDTPEEDGITWTLDQSSEVLGSGKTLTIQVKEFGDAGQYTCHKGGEVLSHSLLLLHKKEDGIWSTDILKDQKEPKNKTFLRCEAKNYSGRFTCWWLTTISTDLTFSVKSSRGSSDPQGVTCGAATLSAERVRGDNKEYEYSVECQEDSAAPAAEESLPIEVMVDAVHKLKYENYTSSFFIRDIIKPDPPKNLQLKPLKNSRQVEVSWEYPDTWSTPHSYFSLTFCVQVQGQDQDEKKDRVFTDKTSATVICRKNASISVRAQDRYYSSSWSEWASVPCS

SEQ ID NO: 63 - protein, 978 aa, Artificial Sequence
  Made in Lab - attenuated protein homodimer construct
QVQLVQSGAEVKKPGASVKVSCKASGYTFTMNIIHWVRQAPGQGLEWMGWIHPGSGAIKYAQKLQGRVTMTTDTSTSTAYMELRSLRSDDTAVYYCARHGGTGRGAMDYWGQGTLVTVSSASTKGPSVFPLAPSSKSTSGGTAALGCLVKDYFPEPVTVSWNSGALTSGVHTFPAVLQSSGLYSLSSVVTVPSSSLGTQTYICNVNHKPSNTKVDKKVEPKSCDKTHTCPPCPAPEAAGGPSVFLFPPKPKDTLMISRTPEVTCVVVDVSHEDPEVKFNWYVDGVEVHNAKTKPREEQYNSTYRVVSVLTVLHQDWLNGKEYKCKVSNKALAAPIEKTISKAKGQPREPQVYTLPPSRDELTKNQVSLTCLVKGFYPSDIAVEWESNGQPENNYKTTPPVLDSDGSFFLYSKLTVDKSRWQQGNVFSCSVMHEALHNHYTQKSLSLSPGGGGGSRNLPVATPDPGMFPCLHHSQNLLRAVSNMLQKARQTLEFYPCTSEEIDHEDITKDKTSTVEACLPLELTKNESSLNSRETSFITNGSCLASRKTSFMMALCLSSIYEDLKMYQVEFKTMNAKLLMDPKRQIFLDQNMLAVIDELMQALNFNSETVPQKSSLEEPDFYKTKIKLCILLHAFRIRAVTIDRVMSYLNASGGSGGPLGLAGSGRSDNRGGAIWELKKDVYVVELDWYPDAPGEMVVLTCDTPEEDGITWTLDQSSEVLGSGKTLTIQVKEFGDAGQYTCHKGGEVLSHSLLLLHKKEDGIWSTDILKDQKEPKNKTFLRCEAKNYSGRFTCWWLTTISTDLTFSVKSSRGSSDPQGVTCGAATLSAERVRGDNKEYEYSVECQEDSAAPAAEESLPIEVMVDAVHKLKYENYTSSFFIRDIIKPDPPKNLQLKPLKNSRQVEVSWEYPDTWSTPHSYFSLTFCVQVQGQDQDEKKDRVFTDKTSATVICRKNASISVRAQDRYYSSSWSEWASVPCS

SEQ ID NO: 64 - protein, 218 aa, Artificial Sequence
  Made in Lab - attenuated protein homodimer construct
EIVLTQSPGTLSLSPGERATLSCRASQSVSTSAYSYMHWYQQKPGQAPRLLIYLASNLESGIPDRFSGSGSGTDFTLTISRLEPEDFAVYYCQQSRELPYTFGQGTKLEIKRTVAAPSVFIFPPSDEQLKSGTASVVCLLNNFYPREAKVQWKVDNALQSGNSQESVTEQDSKDSTYSLSSTLTLSKADYEKHKVYACEVTHQGLSSPVTKSFNRGEC

SEQ ID NO: 65 - protein, 754 aa, Artificial Sequence
  Made in Lab - attenuated protein homodimer construct
QVQLVQSGAEVKKPGASVKVSCKASGYTFTMNIIHWVRQAPGQGLEWMGWIHPGSGAIKYAQKLQGRVTMTTDTSTSTAYMELRSLRSDDTAVYYCARHGGTGRGAMDYWGQGTLVTVSSASTKGPSVFPLAPSSKSTSGGTAALGCLVKDYFPEPVTVSWNSGALTSGVHTFPAVLQSSGLYSLSSVVTVPSSSLGTQTYICNVNHKPSNTKVDKKVEPKSCDKGGGGSRNLPVATPDPGMFPCLHHSQNLLRAVSNMLQKARQTLEFYPCTSEEIDHEDITKDKTSTVEACLPLELTKNESSLNSRETSFITNGSCLASRKTSFMMALCLSSIYEDLKMYQVEFKTMNAKLLMDPKRQIFLDQNMLAVIDELMQALNFNSETVPQKSSLEEPDFYKTKIKLCILLHAFRIRAVTIDRVMSYLNASGGSGGPLGLAGSGRSDNRGGAIWELKKDVYVVELDWYPDAPGEMVVLTCDTPEEDGITWTLDQSSEVLGSGKTLTIQVKEFGDAGQYTCHKGGEVLSHSLLLLHKKEDGIWSTDILKDQKEPKNKTFLRCEAKNYSGRFTCWWLTTISTDLTFSVKSSRGSSDPQGVTCGAATLSAERVRGDNKEYEYSVECQEDSAAPAAEESLPIEVMVDAVHKLKYENYTSSFFIRDIIKPDPPKNLQLKPLKNSRQVEVSWEYPDTWSTPHSYFSLTFCVQVQGQDQDEKKDRVFTDKTSATVICRKNASISVRAQDRYYSSSWSEWASVPCS

SEQ ID NO: 66 - protein, 218 aa, Artificial Sequence; identical to SEQ ID NO: 64
  Made in Lab - attenuated protein homodimer construct

SEQ ID NO: 67 - protein, 759 aa, Artificial Sequence
  Made in Lab - attenuated protein homodimer construct
QVQLVQSGAEVKKPGASVKVSCKASGYTFTMNIIHWVRQAPGQGLEWMGWIHPGSGAIKYAQKLQGRVTMTTDTSTSTAYMELRSLRSDDTAVYYCARHGGTGRGAMDYWGQGTLVTVSSASTKGPSVFPLAPSSKSTSGGTAALGCLVKDYFPEPVTVSWNSGALTSGVHTFPAVLQSSGLYSLSSVVTVPSSSLGTQTYICNVNHKPSNTKVDKKVEPKSCDKGGGGSGGGGSRNLPVATPDPGMFPCLHHSQNLLRAVSNMLQKARQTLEFYPCTSEEIDHEDITKDKTSTVEACLPLELTKNESSLNSRETSFITNGSCLASRKTSFMMALCLSSIYEDLKMYQVEFKTMNAKLLMDPKRQIFLDQNMLAVIDELMQALNFNSETVPQKSSLEEPDFYKTKIKLCILLHAFRIRAVTIDRVMSYLNASGGSGGPLGLAGSGRSDNRGGAIWELKKDVYVVELDWYPDAPGEMVVLTCDTPEEDGITWTLDQSSEVLGSGKTLTIQVKEFGDAGQYTCHKGGEVLSHSLLLLHKKEDGIWSTDILKDQKEPKNKTFLRCEAKNYSGRFTCWWLTTISTDLTFSVKSSRGSSDPQGVTCGAATLSAERVRGDNKEYEYSVECQEDSAAPAAEESLPIEVMVDAVHKLKYENYTSSFFIRDIIKPDPPKNLQLKPLKNSRQVEVSWEYPDTWSTPHSYFSLTFCVQVQGQDQDEKKDRVFTDKTSATVICRKNASISVRAQDRYYSSSWSEWASVPCS

SEQ ID NO: 68 - protein, 218 aa, Artificial Sequence; identical to SEQ ID NO: 64
  Made in Lab - attenuated protein homodimer construct

SEQ ID NO: 69 - protein, 764 aa, Artificial Sequence
  Made in Lab - attenuated protein homodimer construct
QVQLVQSGAEVKKPGASVKVSCKASGYTFTMNIIHWVRQAPGQGLEWMGWIHPGSGAIKYAQKLQGRVTMTTDTSTSTAYMELRSLRSDDTAVYYCARHGGTGRGAMDYWGQGTLVTVSSASTKGPSVFPLAPSSKSTSGGTAALGCLVKDYFPEPVTVSWNSGALTSGVHTFPAVLQSSGLYSLSSVVTVPSSSLGTQTYICNVNHKPSNTKVDKKVEPKSCDKGGGGSGGGGSGGGGSRNLPVATPDPGMFPCLHHSQNLLRAVSNMLQKARQTLEFYPCTSEEIDHEDITKDKTSTVEACLPLELTKNESSLNSRETSFITNGSCLASRKTSFMMALCLSSIYEDLKMYQVEFKTMNAKLLMDPKRQIFLDQNMLAVIDELMQALNFNSETVPQKSSLEEPDFYKTKIKLCILLHAFRIRAVTIDRVMSYLNASGGSGGPLGLAGSGRSDNRGGAIWELKKDVYVVELDWYPDAPGEMVVLTCDTPEEDGITWTLDQSSEVLGSGKTLTIQVKEFGDAGQYTCHKGGEVLSHSLLLLHKKEDGIWSTDILKDQKEPKNKTFLRCEAKNYSGRFTCWWLTTISTDLTFSVKSSRGSSDPQGVTCGAATLSAERVRGDNKEYEYSVECQEDSAAPAAEESLPIEVMVDAVHKLKYENYTSSFFIRDIIKPDPPKNLQLKPLKNSRQVEVSWEYPDTWSTPHSYFSLTFCVQVQGQDQDEKKDRVFTDKTSATVICRKNASISVRAQDRYYSSSWSEWASVPCS

SEQ ID NO: 70 - protein, 218 aa, Artificial Sequence; identical to SEQ ID NO: 64
  Made in Lab - attenuated protein homodimer construct

SEQ ID NO: 71 - protein, 978 aa, Artificial Sequence
  Made in Lab - attenuated protein homodimer construct
QVQLVQSGAEVKKPGSSVKVSCKTSGDTFSTYAISWVRQAPGQGLEWMGGIIPIFGKAHYAQKFQGRVTITADESTSTAYMELSSLRSEDTAVYFCARKFHFVSGSPFGMDVWGQGTTVTVSSASTKGPSVFPLAPCSRSTSESTAALGCLVKDYFPEPVTVSWNSGALTSGVHTFPAVLQSSGLYSLSSVVTVPSSSLGTKTYTCNVDHKPSNTKVDKRVESKYGPPCPPCPAPEFLGGPSVFLFPPKPKDTLMISRTPEVTCVVVDVSQEDPEVQFNWYVDGVEVHNAKTKPREEQFNSTYRVVSVLTVLHQDWLNGKEYKCKVSNKGLPSSIEKTISKAKGQPREPQVYTLPPSQEEMTKNQVSLTCLVKGFYPSDIAVEWESNGQPENNYKTTPPVLDSDGSFFLYSRLTVDKSRWQEGNVFSCSVMHEALHNHYTQKSLSLSLGGGGGSRNLPVATPDPGMFPCLHHSQNLLRAVSNMLQKARQTLEFYPCTSEEIDHEDITKDKTSTVEACLPLELTKNESSLNSRETSFITNGSCLASRKTSFMMALCLSSIYEDLKMYQVEFKTMNAKLLMDPKRQIFLDQNMLAVIDELMQALNFNSETVPQKSSLEEPDFYKTKIKLCILLHAFRIRAVTIDRVMSYLNASGGSGGPLGLAGSGRSDNRGGAIWELKKDVYVVELDWYPDAPGEMVVLTCDTPEEDGITWTLDQSSEVLGSGKTLTIQVKEFGDAGQYTCHKGGEVLSHSLLLLHKKEDGIWSTDILKDQKEPKNKTFLRCEAKNYSGRFTCWWLTTISTDLTFSVKSSRGSSDPQGVTCGAATLSAERVRGDNKEYEYSVECQEDSAAPAAEESLPIEVMVDAVHKLKYENYTSSFFIRDIIKPDPPKNLQLKPLKNSRQVEVSWEYPDTWSTPHSYFSLTFCVQVQGQDQDEKKDRVFTDKTSATVICRKNASISVRAQDRYYSSSWSEWASVPCS

SEQ ID NO: 72 - protein, 213 aa, Artificial Sequence
  Made in Lab - attenuated protein homodimer construct
EIVLTQSPATLSLSPGERATLSCRASQSVSSYLAWYQQKPGQAPRLLIYDASNRATGIPARFSGSGSGTDFTLTISSLEPEDFAVYYCQQRSNWPTFGQGTKVEIKRTVAAPSVFIFPPSDEQLKSGTASVVCLLNNFYPREAKVQWKVDNALQSGNSQESVTEQDSKDSTYSLSSTLTLSKADYEKHKVYACEVTHQGLSSPVTKSFNRGEC

SEQ ID NO: 73 - protein, 750 aa, Artificial Sequence
  Made in Lab - attenuated protein homodimer construct
QVQLVQSGAEVKKPGSSVKVSCKTSGDTFSTYAISWVRQAPGQGLEWMGGIIPIFGKAHYAQKFQGRVTITADESTSTAYMELSSLRSEDTAVYFCARKFHFVSGSPFGMDVWGQGTTVTVSSASTKGPSVFPLAPCSRSTSESTAALGCLVKDYFPEPVTVSWNSGALTSGVHTFPAVLQSSGLYSLSSVVTVPSSSLGTKTYTCNVDHKPSNTKVDKRVGGGGSRNLPVATPDPGMFPCLHHSQNLLRAVSNMLQKARQTLEFYPCTSEEIDHEDITKDKTSTVEACLPLELTKNESSLNSRETSFITNGSCLASRKTSFMMALCLSSIYEDLKMYQVEFKTMNAKLLMDPKRQIFLDQNMLAVIDELMQALNFNSETVPQKSSLEEPDFYKTKIKLCILLHAFRIRAVTIDRVMSYLNASGGSGGPLGLAGSGRSDNRGGAIWELKKDVYVVELDWYPDAPGEMVVLTCDTPEEDGITWTLDQSSEVLGSGKTLTIQVKEFGDAGQYTCHKGGEVLSHSLLLLHKKEDGIWSTDILKDQKEPKNKTFLRCEAKNYSGRFTCWWLTTISTDLTFSVKSSRGSSDPQGVTCGAATLSAERVRGDNKEYEYSVECQEDSAAPAAEESLPIEVMVDAVHKLKYENYTSSFFIRDIIKPDPPKNLQLKPLKNSRQVEVSWEYPDTWSTPHSYFSLTFCVQVQGQDQDEKKDRVFTDKTSATVICRKNASISVRAQDRYYSSSWSEWASVPCS

SEQ ID NO: 74 - protein, 213 aa, Artificial Sequence; identical to SEQ ID NO: 72
  Made in Lab - attenuated protein homodimer construct

SEQ ID NO: 75 - protein, 975 aa, Artificial Sequence
  Made in Lab - attenuated protein homodimer construct
EVQLLESGGGLVQPGGSLRLSCAASGFTFSSYAMSWVRQAPGKGLEWVSAIIGSGASTYYADSVKGRFTISRDNSKNTLYLQMNSLRAEDTAVYYCAKGWFGGFNYWGQGTLVTVSSASTKGPSVFPLAPSSKSTSGGTAALGCLVKDYFPEPVTVSWNSGALTSGVHTFPAVLQSSGLYSLSSVVTVPSSSLGTQTYICNVNHKPSNTKVDKKVEPKSCDKTHTCPPCPAPEAAGGPSVFLFPPKPKDTLMISRTPEVTCVVVDVSHEDPEVKFNWYVDGVEVHNAKTKPREEQYNSTYRVVSVLTVLHQDWLNGKEYKCKVSNKALAAPIEKTISKAKGQPREPQVYTLPPSRDELTKNQVSLTCLVKGFYPSDIAVEWESNGQPENNYKTTPPVLDSDGSFFLYSKLTVDKSRWQQGNVFSCSVMHEALHNHYTQKSLSLSPGGGGGSRNLPVATPDPGMFPCLHHSQNLLRAVSNMLQKARQTLEFYPCTSEEIDHEDITKDKTSTVEACLPLELTKNESSLNSRETSFITNGSCLASRKTSFMMALCLSSIYEDLKMYQVEFKTMNAKLLMDPKRQIFLDQNMLAVIDELMQALNFNSETVPQKSSLEEPDFYKTKIKLCILLHAFRIRAVTIDRVMSYLNASGGSGGPLGLAGSGRSDNRGGAIWELKKDVYVVELDWYPDAPGEMVVLTCDTPEEDGITWTLDQSSEVLGSGKTLTIQVKEFGDAGQYTCHKGGEVLSHSLLLLHKKEDGIWSTDILKDQKEPKNKTFLRCEAKNYSGRFTCWWLTTISTDLTFSVKSSRGSSDPQGVTCGAATLSAERVRGDNKEYEYSVECQEDSAAPAAEESLPIEVMVDAVHKLKYENYTSSFFIRDIIKPDPPKNLQLKPLKNSRQVEVSWEYPDTWSTPHSYFSLTFCVQVQGQDQDEKKDRVFTDKTSATVICRKNASISVRAQDRYYSSSWSEWASVPCS

SEQ ID NO: 76 - protein, 215 aa, Artificial Sequence
  Made in Lab - attenuated protein homodimer construct
EIVLTQSPGTLSLSPGERATLSCRASQSVTSSYLAWYQQKPGQAPRLLINVGSRRATGIPDRFSGSGSGTDFTLTISRLEPEDFAVYYCQQGIMLPPTFGQGTKVEIKRTVAAPSVFIFPPSDEQLKSGTASVVCLLNNFYPREAKVQWKVDNALQSGNSQESVTEQDSKDSTYSLSSTLTLSKADYEKHKVYACEVTHQGLSSPVTKSFNRGEC

SEQ ID NO: 77 - protein, 751 aa, Artificial Sequence
  Made in Lab - attenuated protein homodimer construct
EVQLLESGGGLVQPGGSLRLSCAASGFTFSSYAMSWVRQAPGKGLEWVSAIIGSGASTYYADSVKGRFTISRDNSKNTLYLQMNSLRAEDTAVYYCAKGWFGGFNYWGQGTLVTVSSASTKGPSVFPLAPSSKSTSGGTAALGCLVKDYFPEPVTVSWNSGALTSGVHTFPAVLQSSGLYSLSSVVTVPSSSLGTQTYICNVNHKPSNTKVDKKVEPKSCDKGGGGSRNLPVATPDPGMFPCLHHSQNLLRAVSNMLQKARQTLEFYPCTSEEIDHEDITKDKTSTVEACLPLELTKNESSLNSRETSFITNGSCLASRKTSFMMALCLSSIYEDLKMYQVEFKTMNAKLLMDPKRQIFLDQNMLAVIDELMQALNFNSETVPQKSSLEEPDFYKTKIKLCILLHAFRIRAVTIDRVMSYLNASGGSGGPLGLAGSGRSDNRGGAIWELKKDVYVVELDWYPDAPGEMVVLTCDTPEEDGITWTLDQSSEVLGSGKTLTIQVKEFGDAGQYTCHKGGEVLSHSLLLLHKKEDGIWSTDILKDQKEPKNKTFLRCEAKNYSGRFTCWWLTTISTDLTFSVKSSRGSSDPQGVTCGAATLSAERVRGDNKEYEYSVECQEDSAAPAAEESLPIEVMVDAVHKLKYENYTSSFFIRDIIKPDPPKNLQLKPLKNSRQVEVSWEYPDTWSTPHSYFSLTFCVQVQGQDQDEKKDRVFTDKTSATVICRKNASISVRAQDRYYSSSWSEWASVPCS

SEQ ID NO: 78 - protein, 215 aa, Artificial Sequence; identical to SEQ ID NO: 76
  Made in Lab - attenuated protein homodimer construct

SEQ ID NO: 79 - protein, 528 aa, Artificial Sequence
  Made in Lab - attenuated protein homodimer construct
RNLPVATPDPGMFPCLHHSQNLLRAVSNMLQKARQTLEFYPCTSEEIDHEDITKDKTSTVEACLPLELTKNESSLNSRETSFITNGSCLASRKTSFMMALCLSSIYEDLKMYQVEFKTMNAKLLMDPKRQIFLDQNMLAVIDELMQALNFNSETVPQKSSLEEPDFYKTKIKLCILLHAFRIRAVTIDRVMSYLNAAGGGGSGGGGSENLYFQGGGSGGGGSIWELKKDVYVVELDWYPDAPGEMVVLTCDTPEEDGITWTLDQSSEVLGSGKTLTIQVKEFGDAGQYTCHKGGEVLSHSLLLLHKKEDGIWSTDILKDQKEPKNKTFLRCEAKNYSGRFTCWWLTTISTDLTFSVKSSRGSSDPQGVTCGAATLSAERVRGDNKEYEYSVECQEDSAAPAAEESLPIEVMVDAVHKLKYENYTSSFFIRDIIKPDPPKNLQLKPLKNSRQVEVSWEYPDTWSTPHSYFSLTFCVQVQGQDQDEKKDRVFTDKTSATVICRKNASISVRAQDRYYSSSWSEWASVPCS

SEQ ID NO: 80 - protein, 528 aa, Artificial Sequence
  Made in Lab - attenuated protein homodimer construct
RNLPVATPDPGMFPCLHHSQNLLRAVSNMLQKARQTLEFYPCTSEEIDHEDITKDKTSTVEACLPLELTKNESSLNSRETSFITNGSCLASRKTSFMMALCLSSIYEDLKMYQVEFKTMNAKLLMDPKRQIFLDQNMLAVIDELMQALNFNSETVPQKSSLEEPDFYKTKIKLCILLHAFRIRAVTIDRVMSYLNAAGGGGSGGGGSENLYFQGGGSGGGGSIWELKKDVYVVELDWYPDAPGEMVVLTCDTPEEDGITWTLDQSSEVLGSGKTLTIQVKEFGDAGQYTCHKGGEVLSHSLLLLHKKEDGIWSTDILKDQKEPKNKTFLRCEAKNYSGRFTCWWLTTISTDLTFSVKSSRGSSDPQGVTCGAATLSAERVRGDNKEYEYSVECQEDSAAPAAEESLPIEVMVDAVHKLKYENYTSSFFIRDIIKPDPPKNLQLKPLKNSRQVEVSWEYPDTWSTPHSYFSLTFSVQVQGQDQDEKKDRVFTDKTSATVICRKNASISVRAQDRYYSSSWSEWASVPCS

SEQ ID NO: 81 - protein, 528 aa, Artificial Sequence
  Made in Lab - attenuated protein homodimer construct
RNLPVATPDPGMFPCLHHSQNLLRAVSNMLQKARQTLEFYPCTSEEIDHEDITKDKTSTVEACLPLELTKNESSLNSRETSFITNGSCLASRKTSFMMALCLSSIYEDLKMYQVEFKTMNAKLLMDPKRQIFLDQNMLAVIDELMQALNFNSETVPQKSSLEEPDFYKTKIKLCILLHAFRIRAVTIDRVMSYLNAAGGGGSGGGGSENLYFQGGGSGGGGSIWELKKDVYVVELDWYPDAPGEMVVLTCDTPEEDGITWTLDQSSEVLGSGKTLTIQVKEFGDAGQYTCHKGGEVLSHSLLLLHKKEDGIWSTDILKDQKEPKNKTFLRCEAKNYSGRFTCWWLTTISTDLTFSVKSSRGSSDPQGVTCGAATLSAERVRGDNKEYEYSVECQEDSAAPAAEESLPIEVMVDAVHKLKYENYTSSFFIRDIIKPDPPKNLQLKPLKNSRQVEVSWEYPDTWSTPHSYFSLTFCVQVQGKSKREKKDRVFTDKTSATVICRKNASISVRAQDRYYSSSWSEWASVPCS

SEQ ID NO: 82 - protein, 528 aa, Artificial Sequence
  Made in Lab - attenuated protein homodimer construct
RNLPVATPDPGMFPCLHHSQNLLRAVSNMLQKARQTLEFYPCTSEEIDHEDITKDKTSTVEACLPLELTKNESSLNSRETSFITNGSCLASRKTSFMMALCLSSIYEDLKMYQVEFKTMNAKLLMDPKRQIFLDQNMLAVIDELMQALNFNSETVPQKSSLEEPDFYKTKIKLCILLHAFRIRAVTIDRVMSYLNAAGGGGSGGGGSENLYFQGGGSGGGGSIWELKKDVYVVELDWYPDAPGEMVVLTCDTPEEDGITWTLDQSSEVLGSGKTLTIQVKEFGDAGQYTCHKGGEVLSHSLLLLHKKEDGIWSTDILKDQKEPKNKTFLRCEAKNYSGRFTCWWLTTISTDLTFSVKSSRGSSDPQGVTCGAATLSAERVRGDNKEYEYSVECQEDSAAPAAEESLPIEVMVDAVHKLKYENYTSSFFIRDIIKPDPPKNLQLKPLKNSRQVEVSWEYPDTWSTPHSYFSLTFSVQVQGKSKREKKDRVFTDKTSATVICRKNASISVRAQDRYYSSSWSEWASVPCS

SEQ ID NO: 83 - protein, 528 aa, Artificial Sequence
  Made in Lab - attenuated protein homodimer construct
RNLPVATPDPGMFPCLHHSQNLLRAVSNMLQKARQTLEFYPCTSEEIDHEDITKDKTSTVEACLPLELTKNESCLNSRETSFITNGSCLASRKTSFMMALCLSSIYEDLKMYQVEFKTMNAKLLMDPKRQIFLDQNMLAVIDELMQALNFNSETVPQKSSLEEPDFYKTKIKLCILLHAFRIRAVTIDRVMSYLNAAGGGGSGGGGSENLYFQGGGSGGGGSIWELKKDVYVVELDWYPDAPGEMVVLTCDTPEEDGITWTLDQSSEVLGSGKTLTIQVKEFGDAGQYTCHKGGEVLSHSLLLLHKKEDGIWSTDILKDQKEPKNKTFLRCEAKNYSGRFTCWWLTTISTDLTFSVKSSRGSSDPQGVTCGAATLSAERVRGDNKEYEYSVECQEDSACPAAEESLPIEVMVDAVHKLKYENYTSSFFIRDIIKPDPPKNLQLKPLKNSRQVEVSWEYPDTWSTPHSYFSLTFCVQVQGQDQDEKKDRVFTDKTSATVICRKNASISVRAQDRYYSSSWSEWASVPCS

SEQ ID NO: 84 - protein, 528 aa, Artificial Sequence
  Made in Lab - attenuated protein homodimer construct
RNLPVATPDPGMFPCLHHSQNLLRAVSNMLQKARQTLEFYPCTSEEIDHEDITKDKTSTVEACLPLELTKNESCLNSRETSFITNGSCLASRKTSFMMALCLSSIYEDLKMYQVEFKTMNAKLLMDPKRQIFLDQNMLAVIDELMQALNFNSETVPQKSSLEEPDFYKTKIKLCILLHAFRIRAVTIDRVMSYLNAAGGGGSGGGGSENLYFQGGGSGGGGSIWELKKDVYVVELDWYPDAPGEMVVLTCDTPEEDGITWTLDQSSEVLGSGKTLTIQVKEFGDAGQYTCHKGGEVLSHSLLLLHKKEDGIWSTDILKDQKEPKNKTFLRCEAKNYSGRFTCWWLTTISTDLTFSVKSSRGSSDPQGVTCGAATLSAERVRGDNKEYEYSVECQEDSACPAAEESLPIEVMVDAVHKLKYENYTSSFFIRDIIKPDPPKNLQLKPLKNSRQVEVSWEYPDTWSTPHSYFSLTFSVQVQGQDQDEKKDRVFTDKTSATVICRKNASISVRAQDRYYSSSWSEWASVPCS

SEQ ID NO: 85 - protein, 528 aa, Artificial Sequence
  Made in Lab - attenuated protein homodimer construct
RNLPVATPDPGMFPCLHHSQNLLRAVSNMLQKARQTLEFYPCTSEEIDHEDITKDKTSTVEACLPLELTKNESCLNSRETSFITNGSCLASRKTSFMMALCLSSIYEDLKMYQVEFKTMNAKLLMDPKRQIFLDQNMLAVIDELMQALNFNSETVPQKSSLEEPDFYKTKIKLCILLHAFRIRAVTIDRVMSYLNAAGGGGSGGGGSENLYFQGGGSGGGGSIWELKKDVYVVELDWYPDAPGEMVVLTCDTPEEDGITWTLDQSSEVLGSGKTLTIQVKEFGDAGQYTCHKGGEVLSHSLLLLHKKEDGIWSTDILKDQKEPKNKTFLRCEAKNYSGRFTCWWLTTISTDLTFSVKSSRGSSDPQGVTCGAATLSAERVRGDNKEYEYSVECQEDSACPAAEESLPIEVMVDAVHKLKYENYTSSFFIRDIIKPDPPKNLQLKPLKNSRQVEVSWEYPDTWSTPHSYFSLTFCVQVQGKSKREKKDRVFTDKTSATVICRKNASISVRAQDRYYSSSWSEWASVPCS

SEQ ID NO: 86 - protein, 528 aa, Artificial Sequence
  Made in Lab - attenuated protein homodimer construct
RNLPVATPDPGMFPCLHHSQNLLRAVSNMLQKARQTLEFYPCTSEEIDHEDITKDKTSTVEACLPLELTKNESCLNSRETSFITNGSCLASRKTSFMMALCLSSIYEDLKMYQVEFKTMNAKLLMDPKRQIFLDQNMLAVIDELMQALNFNSETVPQKSSLEEPDFYKTKIKLCILLHAFRIRAVTIDRVMSYLNAAGGGGSGGGGSENLYFQGGGSGGGGSIWELKKDVYVVELDWYPDAPGEMVVLTCDTPEEDGITWTLDQSSEVLGSGKTLTIQVKEFGDAGQYTCHKGGEVLSHSLLLLHKKEDGIWSTDILKDQKEPKNKTFLRCEAKNYSGRFTCWWLTTISTDLTFSVKSSRGSSDPQGVTCGAATLSAERVRGDNKEYEYSVECQEDSACPAAEESLPIEVMVDAVHKLKYENYTSSFFIRDIIKPDPPKNLQLKPLKNSRQVEVSWEYPDTWSTPHSYFSLTFSVQVQGKSKREKKDRVFTDKTSATVICRKNASISVRAQDRYYSSSWSEWASVPCS

SEQ ID NO: 87 - protein, 982 aa, Artificial Sequence
  Made in Lab - attenuated protein homodimer construct
QVQLVQSGAEVKKPGASVKVSCKASGYTFTMNIIHWVRQAPGQGLEWMGWIHPGSGAIKYAQKLQGRVTMTTDTSTSTAYMELRSLRSDDTAVYYCARHGGTGRGAMDYWGQGTLVTVSSASTKGPSVFPLAPSSKSTSGGTAALGCLVKDYFPEPVTVSWNSGALTSGVHTFPAVLQSSGLYSLSSVVTVPSSSLGTQTYICNVNHKPSNTKVDKKVEPKSCDKTHTCPPCPAPEAAGGPSVFLFPPKPKDTLMISRTPEVTCVVVDVSHEDPEVKFNWYVDGVEVHNAKTKPREEQYNSTYRVVSVLTVLHQDWLNGKEYKCKVSNKALAAPIEKTISKAKGQPREPQVYTLPPSRDELTKNQVSLTCLVKGFYPSDIAVEWESNGQPENNYKTTPPVLDSDGSFFLYSKLTVDKSRWQQGNVFSCSVMHEALHNHYTQKSLSLSPGGGGGSRNLPVATPDPGMFPCLHHSQNLLRAVSNMLQKARQTLEFYPCTSEEIDHEDITKDKTSTVEACLPLELTKNESSLNSRETSFITNGSCLASRKTSFMMALCLSSIYEDLKMYQVEFKTMNAKLLMDPKRQIFLDQNMLAVIDELMQALNFNSETVPQKSSLEEPDFYKTKIKLCILLHAFRIRAVTIDRVMSYLNASGGGGSPLGLAGSGRSDNRGSGGGGSIWELKKDVYVVELDWYPDAPGEMVVLTCDTPEEDGITWTLDQSSEVLGSGKTLTIQVKEFGDAGQYTCHKGGEVLSHSLLLLHKKEDGIWSTDILKDQKEPKNKTFLRCEAKNYSGRFTCWWLTTISTDLTFSVKSSRGSSDPQGVTCGAATLSAERVRGDNKEYEYSVECQEDSAAPAAEESLPIEVMVDAVHKLKYENYTSSFFIRDIIKPDPPKNLQLKPLKNSRQVEVSWEYPDTWSTPHSYFSLTFSVQVQGQDQDEKKDRVFTDKTSATVICRKNASISVRAQDRYYSSSWSEWASVPCS

SEQ ID NO: 88 - protein, 218 aa, Artificial Sequence; identical to SEQ ID NO: 64
  Made in Lab - attenuated protein homodimer construct

SEQ ID NO: 89 - protein, 758 aa, Artificial Sequence
  Made in Lab - attenuated protein homodimer construct
QVQLVQSGAEVKKPGASVKVSCKASGYTFTMNIIHWVRQAPGQGLEWMGWIHPGSGAIKYAQKLQGRVTMTTDTSTSTAYMELRSLRSDDTAVYYCARHGGTGRGAMDYWGQGTLVTVSSASTKGPSVFPLAPSSKSTSGGTAALGCLVKDYFPEPVTVSWNSGALTSGVHTFPAVLQSSGLYSLSSVVTVPSSSLGTQTYICNVNHKPSNTKVDKKVEPKSCDKGGGGSRNLPVATPDPGMFPCLHHSQNLLRAVSNMLQKARQTLEFYPCTSEEIDHEDITKDKTSTVEACLPLELTKNESSLNSRETSFITNGSCLASRKTSFMMALCLSSIYEDLKMYQVEFKTMNAKLLMDPKRQIFLDQNMLAVIDELMQALNFNSETVPQKSSLEEPDFYKTKIKLCILLHAFRIRAVTIDRVMSYLNAAGGGGSPLGLAGSGRSDNRGSGGGGSIWELKKDVYVVELDWYPDAPGEMVVLTCDTPEEDGITWTLDQSSEVLGSGKTLTIQVKEFGDAGQYTCHKGGEVLSHSLLLLHKKEDGIWSTDILKDQKEPKNKTFLRCEAKNYSGRFTCWWLTTISTDLTFSVKSSRGSSDPQGVTCGAATLSAERVRGDNKEYEYSVECQEDSAAPAAEESLPIEVMVDAVHKLKYENYTSSFFIRDIIKPDPPKNLQLKPLKNSRQVEVSWEYPDTWSTPHSYFSLTFSVQVQGQDQDEKKDRVFTDKTSATVICRKNASISVRAQDRYYSSSWSEWASVPCS

SEQ ID NO: 90 - protein, 218 aa, Artificial Sequence; identical to SEQ ID NO: 64
  Made in Lab - attenuated protein homodimer construct

SEQ ID NO: 91 - protein, 758 aa, Artificial Sequence
  Made in Lab - attenuated protein homodimer construct
QVQLVQSGAEVKKPGASVKVSCKASGYTFTMNIIHWVRQAPGQGLEWMGWIHPGSGAIKYAQKLQGRVTMTTDTSTSTAYMELRSLRSDDTAVYYCARHGGTGRGAMDYWGQGTLVTVSSASTKGPSVFPLAPSSKSTSGGTAALGCLVKDYFPEPVTVSWNSGALTSGVHTFPAVLQSSGLYSLSSVVTVPSSSLGTQTYICNVNHKPSNTKVDKKVEPKSCDKGGGGSRNLPVATPDPGMFPCLHHSQNLLRAVSNMLQKARQTLEFYPCTSEEIDHEDITKDKTSTVEACLPLELTKNESSLNSRETSFITNGSCLASRKTSFMMALCLSSIYEDLKMYQVEFKTMNAKLLMDPKRQIFLDQNMLAVIDELMQALNFNSETVPQKSSLEEPDFYKTKIKLCILLHAFRIRAVTIDRVMSYLNAAGGGGSGGGGSGGGGSGGGGSGGGGSIWELKKDVYVVELDWYPDAPGEMVVLTCDTPEEDGITWTLDQSSEVLGSGKTLTIQVKEFGDAGQYTCHKGGEVLSHSLLLLHKKEDGIWSTDILKDQKEPKNKTFLRCEAKNYSGRFTCWWLTTISTDLTFSVKSSRGSSDPQGVTCGAATLSAERVRGDNKEYEYSVECQEDSAAPAAEESLPIEVMVDAVHKLKYENYTSSFFIRDIIKPDPPKNLQLKPLKNSRQVEVSWEYPDTWSTPHSYFSLTFSVQVQGQDQDEKKDRVFTDKTSATVICRKNASISVRAQDRYYSSSWSEWASVPCS

SEQ ID NO: 92 - protein, 218 aa, Artificial Sequence; identical to SEQ ID NO: 64
  Made in Lab - attenuated protein homodimer construct

SEQ ID NO: 93 - protein, 982 aa, Artificial Sequence
  Made in Lab - attenuated protein homodimer construct
QVQLVQSGAEVKKPGSSVKVSCKTSGDTFSTYAISWVRQAPGQGLEWMGGIIPIFGKAHYAQKFQGRVTITADESTSTAYMELSSLRSEDTAVYFCARKFHFVSGSPFGMDVWGQGTTVTVSSASTKGPSVFPLAPCSRSTSESTAALGCLVKDYFPEPVTVSWNSGALTSGVHTFPAVLQSSGLYSLSSVVTVPSSSLGTKTYTCNVDHKPSNTKVDKRVESKYGPPCPPCPAPEFLGGPSVFLFPPKPKDTLMISRTPEVTCVVVDVSQEDPEVQFNWYVDGVEVHNAKTKPREEQFNSTYRVVSVLTVLHQDWLNGKEYKCKVSNKGLPSSIEKTISKAKGQPREPQVYTLPPSQEEMTKNQVSLTCLVKGFYPSDIAVEWESNGQPENNYKTTPPVLDSDGSFFLYSRLTVDKSRWQEGNVFSCSVMHEALHNHYTQKSLSLSLGGGGGSRNLPVATPDPGMFPCLHHSQNLLRAVSNMLQKARQTLEFYPCTSEEIDHEDITKDKTSTVEACLPLELTKNESSLNSRETSFITNGSCLASRKTSFMMALCLSSIYEDLKMYQVEFKTMNAKLLMDPKRQIFLDQNMLAVIDELMQALNFNSETVPQKSSLEEPDFYKTKIKLCILLHAFRIRAVTIDRVMSYLNAAGGGGSPLGLAGSGRSDNRGSGGGGSIWELKKDVYVVELDWYPDAPGEMVVLTCDTPEEDGITWTLDQSSEVLGSGKTLTIQVKEFGDAGQYTCHKGGEVLSHSLLLLHKKEDGIWSTDILKDQKEPKNKTFLRCEAKNYSGRFTCWWLTTISTDLTFSVKSSRGSSDPQGVTCGAATLSAERVRGDNKEYEYSVECQEDSAAPAAEESLPIEVMVDAVHKLKYENYTSSFFIRDIIKPDPPKNLQLKPLKNSRQVEVSWEYPDTWSTPHSYFSLTFSVQVQGQDQDEKKDRVFTDKTSATVICRKNASISVRAQDRYYSSSWSEWASVPCS

SEQ ID NO: 94 - protein, 213 aa, Artificial Sequence; identical to SEQ ID NO: 72
  Made in Lab - attenuated protein homodimer construct

SEQ ID NO: 95 - protein, 754 aa, Artificial Sequence
  Made in Lab - attenuated protein homodimer construct
QVQLVQSGAEVKKPGSSVKVSCKTSGDTFSTYAISWVRQAPGQGLEWMGGIIPIFGKAHYAQKFQGRVTITADESTSTAYMELSSLRSEDTAVYFCARKFHFVSGSPFGMDVWGQGTTVTVSSASTKGPSVFPLAPCSRSTSESTAALGCLVKDYFPEPVTVSWNSGALTSGVHTFPAVLQSSGLYSLSSVVTVPSSSLGTKTYTCNVDHKPSNTKVDKRVGGGGSRNLPVATPDPGMFPCLHHSQNLLRAVSNMLQKARQTLEFYPCTSEEIDHEDITKDKTSTVEACLPLELTKNESSLNSRETSFITNGSCLASRKTSFMMALCLSSIYEDLKMYQVEFKTMNAKLLMDPKRQIFLDQNMLAVIDELMQALNFNSETVPQKSSLEEPDFYKTKIKLCILLHAFRIRAVTIDRVMSYLNAAGGGGSPLGLAGSGRSDNRGSGGGGSIWELKKDVYVVELDWYPDAPGEMVVLTCDTPEEDGITWTLDQSSEVLGSGKTLTIQVKEFGDAGQYTCHKGGEVLSHSLLLLHKKEDGIWSTDILKDQKEPKNKTFLRCEAKNYSGRFTCWWLTTISTDLTFSVKSSRGSSDPQGVTCGAATLSAERVRGDNKEYEYSVECQEDSAAPAAEESLPIEVMVDAVHKLKYENYTSSFFIRDIIKPDPPKNLQLKPLKNSRQVEVSWEYPDTWSTPHSYFSLTFSVQVQGQDQDEKKDRVFTDKTSATVICRKNASISVRAQDRYYSSSWSEWASVPCS

SEQ ID NO: 96 - protein, 213 aa, Artificial Sequence; identical to SEQ ID NO: 72
  Made in Lab - attenuated protein homodimer construct

SEQ ID NO: 97 - protein, 754 aa, Artificial Sequence
  Made in Lab - attenuated protein homodimer construct
QVQLVQSGAEVKKPGSSVKVSCKTSGDTFSTYAISWVRQAPGQGLEWMGGIIPIFGKAHYAQKFQGRVTITADESTSTAYMELSSLRSEDTAVYFCARKFHFVSGSPFGMDVWGQGTTVTVSSASTKGPSVFPLAPCSRSTSESTAALGCLVKDYFPEPVTVSWNSGALTSGVHTFPAVLQSSGLYSLSSVVTVPSSSLGTKTYTCNVDHKPSNTKVDKRVGGGGSRNLPVATPDPGMFPCLHHSQNLLRAVSNMLQKARQTLEFYPCTSEEIDHEDITKDKTSTVEACLPLELTKNESSLNSRETSFITNGSCLASRKTSFMMALCLSSIYEDLKMYQVEFKTMNAKLLMDPKRQIFLDQNMLAVIDELMQALNFNSETVPQKSSLEEPDFYKTKIKLCILLHAFRIRAVTIDRVMSYLNAAGGGGSGGGGSGGGGSGGGGSGGGGSIWELKKDVYVVELDWYPDAPGEMVVLTCDTPEEDGITWTLDQSSEVLGSGKTLTIQVKEFGDAGQYTCHKGGEVLSHSLLLLHKKEDGIWSTDILKDQKEPKNKTFLRCEAKNYSGRFTCWWLTTISTDLTFSVKSSRGSSDPQGVTCGAATLSAERVRGDNKEYEYSVECQEDSAAPAAEESLPIEVMVDAVHKLKYENYTSSFFIRDIIKPDPPKNLQLKPLKNSRQVEVSWEYPDTWSTPHSYFSLTFSVQVQGQDQDEKKDRVFTDKTSATVICRKNASISVRAQDRYYSSSWSEWASVPCS

SEQ ID NO: 98 - protein, 213 aa, Artificial Sequence; identical to SEQ ID NO: 72
  Made in Lab - attenuated protein homodimer construct

SEQ ID NO: 99 - protein, 754 aa, Artificial Sequence
  Made in Lab - attenuated protein homodimer construct
QVQLVQSGAEVKKPGSSVKVSCKTSGDTFSTYAISWVRQAPGQGLEWMGGIIPIFGKAHYAQKFQGRVTITADESTSTAYMELSSLRSEDTAVYFCARKFHFVSGSPFGMDVWGQGTTVTVSSASTKGPSVFPLAPCSRSTSESTAALGCLVKDYFPEPVTVSWNSGALTSGVHTFPAVLQSSGLYSLSSVVTVPSSSLGTKTYTCNVDHKPSNTKVDKRVGGGGSRNLPVATPDPGMFPCLHHSQNLLRAVSNMLQKARQTLEFYPCTSEEIDHEDITKDKTSTVEACLPLELTKNESSLNSRETSFITNGSCLASRKTSFMMALCLSSIYEDLKMYQVEFKTMNAKLLMDPKRQIFLDQNMLAVIDELMQALNFNSETVPQKSSLEEPDFYKTKIKLCILLHAFRIRAVTIARVMSYLNAAGGGGSPLGLAGSGRSDNRGSGGGGSIWELKKDVYVVELDWYPDAPGEMVVLTCDTPEEDGITWTLDQSSEVLGSGKTLTIQVKEFGDAGQYTCHKGGEVLSHSLLLLHKKEDGIWSTDILKDQKEPKNKTFLRCEAKNYSGRFTCWWLTTISTDLTFSVKSSRGSSDPQGVTCGAATLSAERVRGDNKEYEYSVECQEDSAAPAAEESLPIEVMVDAVHKLKYENYTSSFFIRDIIKPDPPKNLQLKPLKNSRQVEVSWEYPDTWSTPHSYFSLTFSVQVQGQDQDEKKDRVFTDKTSATVICRKNASISVRAQDRYYSSSWSEWASVPCS

SEQ ID NO: 100 - protein, 213 aa, Artificial Sequence; identical to SEQ ID NO: 72
  Made in Lab - attenuated protein homodimer construct

SEQ ID NO: 101 - protein, 754 aa, Artificial Sequence
  Made in Lab - attenuated protein homodimer construct
QVQLVQSGAEVKKPGSSVKVSCKTSGDTFSTYAISWVRQAPGQGLEWMGGIIPIFGKAHYAQKFQGRVTITADESTSTAYMELSSLRSEDTAVYFCARKFHFVSGSPFGMDVWGQGTTVTVSSASTKGPSVFPLAPCSRSTSESTAALGCLVKDYFPEPVTVSWNSGALTSGVHTFPAVLQSSGLYSLSSVVTVPSSSLGTKTYTCNVDHKPSNTKVDKRVGGGGSRNLPVATPDPGMFPCLHHSQNLLRAVSNMLQKARQTLEFYPCTSEEIDHEDITKDKTSTVEACLPLELTKNESSLNSRETSFITNGSCLASRKTSFMMALCLSSIYEDLKMYQVEFKTMNAKLLMDPKRQIFLDQNMLAVIDELMQALNFNSETVPQKSSLEEPDFAKTKIKLCILLHAFRIRAVTIDRVMSYLNAAGGGGSPLGLAGSGRSDNRGSGGGGSIWELKKDVYVVELDWYPDAPGEMVVLTCDTPEEDGITWTLDQSSEVLGSGKTLTIQVKEFGDAGQYTCHKGGEVLSHSLLLLHKKEDGIWSTDILKDQKEPKNKTFLRCEAKNYSGRFTCWWLTTISTDLTFSVKSSRGSSDPQGVTCGAATLSAERVRGDNKEYEYSVECQEDSAAPAAEESLPIEVMVDAVHKLKYENYTSSFFIRDIIKPDPPKNLQLKPLKNSRQVEVSWEYPDTWSTPHSYFSLTFSVQVQGQDQDEKKDRVFTDKTSATVICRKNASISVRAQDRYYSSSWSEWASVPCS

SEQ ID NO: 102 - protein, 213 aa, Artificial Sequence; identical to SEQ ID NO: 72
  Made in Lab - attenuated protein homodimer construct

SEQ ID NO: 103 - protein, 754 aa, Artificial Sequence
  Made in Lab - attenuated protein homodimer construct
QVQLVQSGAEVKKPGSSVKVSCKTSGDTFSTYAISWVRQAPGQGLEWMGGIIPIFGKAHYAQKFQGRVTITADESTSTAYMELSSLRSEDTAVYFCARKFHFVSGSPFGMDVWGQGTTVTVSSASTKGPSVFPLAPCSRSTSESTAALGCLVKDYFPEPVTVSWNSGALTSGVHTFPAVLQSSGLYSLSSVVTVPSSSLGTKTYTCNVDHKPSNTKVDKRVGGGGSRNLPVATPDPGMFPCLHHSQNLLRAVSNMLQKARQTLEFYPCTSEEIDHEDITKDKTSTVEACLPLELTKNESSLNSRETSFITNGSCLASRKTSFMMALCLSSIYEDLKMYQVEFKTMNAKLLMDPKRQIFLDQNMLAVIDELMQALNFNSETVPQKSSLEEPDFDKTKIKLCILLHAFRIRAVTIDRVMSYLNAAGGGGSPLGLAGSGRSDNRGSGGGGSIWELKKDVYVVELDWYPDAPGEMVVLTCDTPEEDGITWTLDQSSEVLGSGKTLTIQVKEFGDAGQYTCHKGGEVLSHSLLLLHKKEDGIWSTDILKDQKEPKNKTFLRCEAKNYSGRFTCWWLTTISTDLTFSVKSSRGSSDPQGVTCGAATLSAERVRGDNKEYEYSVECQEDSAAPAAEESLPIEVMVDAVHKLKYENYTSSFFIRDIIKPDPPKNLQLKPLKNSRQVEVSWEYPDTWSTPHSYFSLTFSVQVQGQDQDEKKDRVFTDKTSATVICRKNASISVRAQDRYYSSSWSEWASVPCS

SEQ ID NO: 104 - protein, 213 aa, Artificial Sequence; identical to SEQ ID NO: 72
  Made in Lab - attenuated protein homodimer construct

SEQ ID NO: 105 - protein, 534 aa, Artificial Sequence
  Made in Lab - attenuated protein heterodimer construct
EVQLVESGGGLVQPGGSLRLSCAASGFTFSDSWIHWVRQAPGKGLEWVAWISPYGGSTYYADSVKGRFTISADTSKNTAYLQMNSLRAEDTAVYYCARRHWPGGFDYWGQGTLVTVSSASTKGPSVFPLAPSSKSTSGGTAALGCLVKDYFPEPVTVSWNSGALTSGVHTFPAVLQSSGLYSLSSVVTVPSSSLGTQTYICNVNHKPSNTKVDKKVEPKSCDKGGGGSIWELKKDVYVVELDWYPDAPGEMVVLTCDTPEEDGITWTLDQSSEVLGSGKTLTIQVKEFGDAGQYTCHKGGEVLSHSLLLLHKKEDGIWSTDILKDQKEPKNKTFLRCEAKNYSGRFTCWWLTTISTDLTFSVKSSRGSSDPQGVTCGAATLSAERVRGDNKEYEYSVECQEDSACPAAEESLPIEVMVDAVHKLKYENYTSSFFIRDIIKPDPPKNLQLKPLKNSRQVEVSWEYPDTWSTPHSYFSLTFSVQVQGKSKREKKDRVFTDKTSATVICRKNASISVRAQDRYYSSSWSEWASVPCS

SEQ ID NO: 106 - protein, 416 aa, Artificial Sequence
  Made in Lab - attenuated protein heterodimer construct
DIQMTQSPSSLSASVGDRVTITCRASQDVSTAVAWYQQKPGKAPKLLIYSASFLYSGVPSRFSGSGSGTDFTLTISSLQPEDFATYYCQQYLYHPATFGQGTKVEIKRTVAAPSVFIFPPSDEQLKSGTASVVCLLNNFYPREAKVQWKVDNALQSGNSQESVTEQDSKDSTYSLSSTLTLSKADYEKHKVYACEVTHQGLSSPVTKSFNRGECGGGGSRNLPVATPDPGMFPCLHHSQNLLRAVSNMLQKARQTLEFYPCTSEEIDHEDITKDKTSTVEACLPLELTKNESCLNSRETSFITNGSCLASRKTSFMMALCLSSIYEDLKMYQVEFKTMNAKLLMDPKRQIFLDQNMLAVIDELMQALNFNSETVPQKSSLEEPDFYKTKIKLCILLHAFRIRAVTIDRVMSYLNAS

SEQ ID NO: 107 - protein, 306 aa, Artificial Sequence; identical to SEQ ID NO: 10
  Made in Lab - attenuated protein heterodimer construct

SEQ ID NO: 108 - protein, 223 aa, Artificial Sequence
  Made in Lab - attenuated protein heterodimer construct
EVQLVESGGGLVQPGGSLRLSCAASGFTFSDSWIHWVRQAPGKGLEWVAWISPYGGSTYYADSVKGRFTISADTSKNTAYLQMNSLRAEDTAVYYCARRHWPGGFDYWGQGTLVTVSSASTKGPSVFPLAPSSKSTSGGTAALGCLVKDYFPEPVTVSWNSGALTSGVHTFPAVLQSSGLYSLSSVVTVPSSSLGTQTYICNVNHKPSNTKVDKKVEPKSCDK

SEQ ID NO: 109 - protein, 416 aa, Artificial Sequence; identical to SEQ ID NO: 106
  Made in Lab - attenuated protein heterodimer construct

SEQ ID NO: 110 - protein, 534 aa, Artificial Sequence
  Made in Lab - attenuated protein heterodimer construct
EVQLVESGGGLVQPGGSLRLSCAASGFTFSDSWIHWVRQAPGKGLEWVAWISPYGGSTYYADSVKGRFTISADTSKNTAYLQMNSLRAEDTAVYYCARRHWPGGFDYWGQGTLVTVSSASTKGPSVFPLAPSSKSTSGGTAALGCLVKDYFPEPVTVSWNSGALTSGVHTFPAVLQSSGLYSLSSVVTVPSSSLGTQTYICNVNHKPSNTKVDKKVEPKSCDKGGGGSIWELKKDVYVVELDWYPDAPGEMVVLTCDTPEEDGITWTLDQSSEVLGSGKTLTIQVKEFGDAGQYTCHKGGEVLSHSLLLLHKKEDGIWSTDILKDQKEPKNKTFLRCEAKNYSGRFTCWWLTTISTDLTFSVKSSRGSSDPQGVTCGAATLSAERVRGDNKEYEYSVECQEDSAAPAAEESLPIEVMVDAVHKLKYENYTSSFFIRDIIKPDPPKNLQLKPLKNSRQVEVSWEYPDTWSTPHSYFSLTFSVQVQGKSKREKKDRVFTDKTSATVICRKNASISVRAQDRYYSSSWSEWASVPCS

SEQ ID NO: 111 - protein, 416 aa, Artificial Sequence
  Made in Lab - attenuated protein heterodimer construct
DIQMTQSPSSLSASVGDRVTITCRASQDVSTAVAWYQQKPGKAPKLLIYSASFLYSGVPSRFSGSGSGTDFTLTISSLQPEDFATYYCQQYLYHPATFGQGTKVEIKRTVAAPSVFIFPPSDEQLKSGTASVVCLLNNFYPREAKVQWKVDNALQSGNSQESVTEQDSKDSTYSLSSTLTLSKADYEKHKVYACEVTHQGLSSPVTKSFNRGECGGGGSRNLPVATPDPGMFPCLHHSQNLLRAVSNMLQKARQTLEFYPCTSEEIDHEDITKDKTSTVEACLPLELTKNESSLNSRETSFITNGSCLASRKTSFMMALCLSSIYEDLKMYQVEFKTMNAKLLMDPKRQIFLDQNMLAVIDELMQALNFNSETVPQKSSLEEPDFYKTKIKLCILLHAFRIRAVTIDRVMSYLNAS

SEQ ID NO: 112 - protein, 534 aa, Artificial Sequence
  Made in Lab - attenuated protein heterodimer construct
EVQLVESGGGLVQPGGSLRLSCAASGFTFSDSWIHWVRQAPGKGLEWVAWISPYGGSTYYADSVKGRFTISADTSKNTAYLQMNSLRAEDTAVYYCARRHWPGGFDYWGQGTLVTVSSASTKGPSVFPLAPSSKSTSGGTAALGCLVKDYFPEPVTVSWNSGALTSGVHTFPAVLQSSGLYSLSSVVTVPSSSLGTQTYICNVNHKPSNTKVDKKVEPKSCDKGGGGSIWELKKDVYVVELDWYPDAPGEMVVLTCDTPEEDGITWTLDQSSEVLGSGKTLTIQVKEFGDAGQYTCHKGGEVLSHSLLLLHKKEDGIWSTDILKDQKEPKNKTFLRCEAKNYSGRFTCWWLTTISTDLTFSVKSSRGSSDPQGVTCGAATLSAERVRGDNKEYEYSVECQEDSAAPAAEESLPIEVMVDAVHKLKYENYTSSFFIRDIIKPDPPKNLQLKPLKNSRQVEVSWEYPDTWSTPHSYFSLTFSVQVQGQDQDEKKDRVFTDKTSATVICRKNASISVRAQDRYYSSSWSEWASVPCS

SEQ ID NO: 113 - protein, 416 aa, Artificial Sequence; identical to SEQ ID NO: 111
  Made in Lab - attenuated protein heterodimer construct

SEQ ID NO: 114 - protein, 534 aa, Artificial Sequence; identical to SEQ ID NO: 112
  Made in Lab - attenuated protein heterodimer construct

SEQ ID NO: 115 - protein, 417 aa, Artificial Sequence
  Made in Lab - attenuated protein heterodimer construct
DIQMTQSPSSLSASVGDRVTITCRASQDVSTAVAWYQQKPGKAPKLLIYSASFLYSGVPSRFSGSGSGTDFTLTISSLQPEDFATYYCQQYLYHPATFGQGTKVEIKRTVAAPSVFIFPPSDEQLKSGTASVVCLLNNFYPREAKVQWKVDNALQSGNSQESVTEQDSKDSTYSLSSTLTLSKADYEKHKVYACEVTHQGLSSPVTKSFNRGECGGGGSRNLPVATPDPGMFPCLHHSQNLLRAVSNMLQKARQTLEFYPCTSEEIDHEDITKDKTSTVEACLPLELTKNESSLNSRETSFITNGSCLASRKTSFMMALCLSSIYEDLKMYQVEFKTMNAKLLMDPKRQIFLDQNMLAVIDELMQALNFNSETVPQKSSLEEPDFYKTKIKLCILLHAFRIRAVTIDRVMSYLNASA

SEQ ID NO: 116 - protein, 534 aa, Artificial Sequence; identical to SEQ ID NO: 112
  Made in Lab - attenuated protein heterodimer construct

SEQ ID NO: 117 - protein, 417 aa, Artificial Sequence; identical to SEQ ID NO: 115
  Made in Lab - attenuated protein heterodimer construct

SEQ ID NO: 118 - protein, 425 aa, Artificial Sequence
  Made in Lab - attenuated protein heterodimer construct
EVQLVESGGGLVQPGGSLRLSCAASGFTFSDSWIHWVRQAPGKGLEWVAWISPYGGSTYYADSVKGRFTISADTSKNTAYLQMNSLRAEDTAVYYCARRHWPGGFDYWGQGTLVTVSSASTKGPSVFPLAPSSKSTSGGTAALGCLVKDYFPEPVTVSWNSGALTSGVHTFPAVLQSSGLYSLSSVVTVPSSSLGTQTYICNVNHKPSNTKVDKKVEPKSCDKGGGGSRNLPVATPDPGMFPCLHHSQNLLRAVSNMLQKARQTLEFYPCTSEEIDHEDITKDKTSTVEACLPLELTKNESCLNSRETSFITNGSCLASRKTSFMMALCLSSIYEDLKMYQVEFKTMNAKLLMDPKRQIFLDQNMLAVIDELMQALNFNSETVPQKSSLEEPDFYKTKIKLCILLHAFRIRAVTIDRVMSYLNAS

SEQ ID NO: 119 - protein, 525 aa, Artificial Sequence
  Made in Lab - attenuated protein heterodimer construct
DIQMTQSPSSLSASVGDRVTITCRASQDVSTAVAWYQQKPGKAPKLLIYSASFLYSGVPSRFSGSGSGTDFTLTISSLQPEDFATYYCQQYLYHPATFGQGTKVEIKRTVAAPSVFIFPPSDEQLKSGTASVVCLLNNFYPREAKVQWKVDNALQSGNSQESVTEQDSKDSTYSLSSTLTLSKADYEKHKVYACEVTHQGLSSPVTKSFNRGECGGGGSIWELKKDVYVVELDWYPDAPGEMVVLTCDTPEEDGITWTLDQSSEVLGSGKTLTIQVKEFGDAGQYTCHKGGEVLSHSLLLLHKKEDGIWSTDILKDQKEPKNKTFLRCEAKNYSGRFTCWWLTTISTDLTFSVKSSRGSSDPQGVTCGAATLSAERVRGDNKEYEYSVECQEDSACPAAEESLPIEVMVDAVHKLKYENYTSSFFIRDIIKPDPPKNLQLKPLKNSRQVEVSWEYPDTWSTPHSYFSLTFSVQVQGKSKREKKDRVFTDKTSATVICRKNASISVRAQDRYYSSSWSEWASVPCS

SEQ ID NO: 120 - protein, 425 aa, Artificial Sequence; identical to SEQ ID NO: 118
  Made in Lab - attenuated protein heterodimer construct

SEQ ID NO: 121 - protein, 306 aa, Artificial Sequence; identical to SEQ ID NO: 10
  Made in Lab - attenuated protein heterodimer construct

SEQ ID NO: 122 - protein, 214 aa, Artificial Sequence
  Made in Lab - attenuated protein heterodimer construct
DIQMTQSPSSLSASVGDRVTITCRASQDVSTAVAWYQQKPGKAPKLLIYSASFLYSGVPSRFSGSGSGTDFTLTISSLQPEDFATYYCQQYLYHPATFGQGTKVEIKRTVAAPSVFIFPPSDEQLKSGTASVVCLLNNFYPREAKVQWKVDNALQSGNSQESVTEQDSKDSTYSLSSTLTLSKADYEKHKVYACEVTHQGLSSPVTKSFNRGEC

SEQ ID NO: 123 - protein, 425 aa, Artificial Sequence
  Made in Lab - attenuated protein heterodimer construct
EVQLVESGGGLVQPGGSLRLSCAASGFTFSDSWIHWVRQAPGKGLEWVAWISPYGGSTYYADSVKGRFTISADTSKNTAYLQMNSLRAEDTAVYYCARRHWPGGFDYWGQGTLVTVSSASTKGPSVFPLAPSSKSTSGGTAALGCLVKDYFPEPVTVSWNSGALTSGVHTFPAVLQSSGLYSLSSVVTVPSSSLGTQTYICNVNHKPSNTKVDKKVEPKSCDKGGGGSRNLPVATPDPGMFPCLHHSQNLLRAVSNMLQKARQTLEFYPCTSEEIDHEDITKDKTSTVEACLPLELTKNESSLNSRETSFITNGSCLASRKTSFMMALCLSSIYEDLKMYQVEFKTMNAKLLMDPKRQIFLDQNMLAVIDELMQALNFNSETVPQKSSLEEPDFYKTKIKLCILLHAFRIRAVTIDRVMSYLNAS

SEQ ID NO: 124 - protein, 525 aa, Artificial Sequence
  Made in Lab - attenuated protein heterodimer construct
DIQMTQSPSSLSASVGDRVTITCRASQDVSTAVAWYQQKPGKAPKLLIYSASFLYSGVPSRFSGSGSGTDFTLTISSLQPEDFATYYCQQYLYHPATFGQGTKVEIKRTVAAPSVFIFPPSDEQLKSGTASVVCLLNNFYPREAKVQWKVDNALQSGNSQESVTEQDSKDSTYSLSSTLTLSKADYEKHKVYACEVTHQGLSSPVTKSFNRGECGGGGSIWELKKDVYVVELDWYPDAPGEMVVLTCDTPEEDGITWTLDQSSEVLGSGKTLTIQVKEFGDAGQYTCHKGGEVLSHSLLLLHKKEDGIWSTDILKDQKEPKNKTFLRCEAKNYSGRFTCWWLTTISTDLTFSVKSSRGSSDPQGVTCGAATLSAERVRGDNKEYEYSVECQEDSAAPAAEESLPIEVMVDAVHKLKYENYTSSFFIRDIIKPDPPKNLQLKPLKNSRQVEVSWEYPDTWSTPHSYFSLTFSVQVQGKSKREKKDRVFTDKTSATVICRKNASISVRAQDRYYSSSWSEWASVPCS

SEQ ID NO: 125 - protein, 425 aa, Artificial Sequence; identical to SEQ ID NO: 123
  Made in Lab - attenuated protein heterodimer construct

SEQ ID NO: 126 - protein, 525 aa, Artificial Sequence
  Made in Lab - attenuated protein heterodimer construct
DIQMTQSPSSLSASVGDRVTITCRASQDVSTAVAWYQQKPGKAPKLLIYSASFLYSGVPSRFSGSGSGTDFTLTISSLQPEDFATYYCQQYLYHPATFGQGTKVEIKRTVAAPSVFIFPPSDEQLKSGTASVVCLLNNFYPREAKVQWKVDNALQSGNSQESVTEQDSKDSTYSLSSTLTLSKADYEKHKVYACEVTHQGLSSPVTKSFNRGECGGGGSIWELKKDVYVVELDWYPDAPGEMVVLTCDTPEEDGITWTLDQSSEVLGSGKTLTIQVKEFGDAGQYTCHKGGEVLSHSLLLLHKKEDGIWSTDILKDQKEPKNKTFLRCEAKNYSGRFTCWWLTTISTDLTFSVKSSRGSSDPQGVTCGAATLSAERVRGDNKEYEYSVECQEDSAAPAAEESLPIEVMVDAVHKLKYENYTSSFFIRDIIKPDPPKNLQLKPLKNSRQVEVSWEYPDTWSTPHSYFSLTFSVQVQGQDQDEKKDRVFTDKTSATVICRKNASISVRAQDRYYSSSWSEWASVPCS

SEQ ID NO: 127 - protein, 426 aa, Artificial Sequence
  Made in Lab - attenuated protein heterodimer construct
EVQLVESGGGLVQPGGSLRLSCAASGFTFSDSWIHWVRQAPGKGLEWVAWISPYGGSTYYADSVKGRFTISADTSKNTAYLQMNSLRAEDTAVYYCARRHWPGGFDYWGQGTLVTVSSASTKGPSVFPLAPSSKSTSGGTAALGCLVKDYFPEPVTVSWNSGALTSGVHTFPAVLQSSGLYSLSSVVTVPSSSLGTQTYICNVNHKPSNTKVDKKVEPKSCDKGGGGSRNLPVATPDPGMFPCLHHSQNLLRAVSNMLQKARQTLEFYPCTSEEIDHEDITKDKTSTVEACLPLELTKNESSLNSRETSFITNGSCLASRKTSFMMALCLSSIYEDLKMYQVEFKTMNAKLLMDPKRQIFLDQNMLAVIDELMQALNFNSETVPQKSSLEEPDFYKTKIKLCILLHAFRIRAVTIDRVMSYLNASA

SEQ ID NO: 128 - protein, 525 aa, Artificial Sequence; identical to SEQ ID NO: 124
  Made in Lab - attenuated protein heterodimer construct

SEQ ID NO: 129 - protein, 426 aa, Artificial Sequence; identical to SEQ ID NO: 127
  Made in Lab - attenuated protein heterodimer construct

SEQ ID NO: 130 - protein, 525 aa, Artificial Sequence; identical to SEQ ID NO: 126
  Made in Lab - attenuated protein heterodimer construct

SEQ ID NO: 131 - protein, 529 aa, Artificial Sequence
  Made in Lab - attenuated protein heterodimer construct
QVQLVESGGGVVQPGRSLRLDCKASGITFSNSGMHWVRQAPGKGLEWVAVIWYDGSKRYYADSVKGRFTISRDNSKNTLFLQMNSLRAEDTAVYYCATNDDYWGQGTLVTVSSASTKGPSVFPLAPSSKSTSGGTAALGCLVKDYFPEPVTVSWNSGALTSGVHTFPAVLQSSGLYSLSSVVTVPSSSLGTQTYICNVNHKPSNTKVDKKVEPKSCDKGGGGSIWELKKDVYVVELDWYPDAPGEMVVLTCDTPEEDGITWTLDQSSEVLGSGKTLTIQVKEFGDAGQYTCHKGGEVLSHSLLLLHKKEDGIWSTDILKDQKEPKNKTFLRCEAKNYSGRFTCWWLTTISTDLTFSVKSSRGSSDPQGVTCGAATLSAERVRGDNKEYEYSVECQEDSAAPAAEESLPIEVMVDAVHKLKYENYTSSFFIRDIIKPDPPKNLQLKPLKNSRQVEVSWEYPDTWSTPHSYFSLTFSVQVQGQDQDEKKDRVFTDKTSATVICRKNASISVRAQDRYYSSSWSEWASVPCS

SEQ ID NO: 132 - protein, 416 aa, Artificial Sequence
  Made in Lab - attenuated protein heterodimer construct
EIVLTQSPATLSLSPGERATLSCRASQSVSSYLAWYQQKPGQAPRLLIYDASNRATGIPARFSGSGSGTDFTLTISSLEPEDFAVYYCQQSSNWPRTFGQGTKVEIKRTVAAPSVFIFPPSDEQLKSGTASVVCLLNNFYPREAKVQWKVDNALQSGNSQESVTEQDSKDSTYSLSSTLTLSKADYEKHKVYACEVTHQGLSSPVTKSFNRGECGGGGSRNLPVATPDPGMFPCLHHSQNLLRAVSNMLQKARQTLEFYPCTSEEIDHEDITKDKTSTVEACLPLELTKNESSLNSRETSFITNGSCLASRKTSFMMALCLSSIYEDLKMYQVEFKTMNAKLLMDPKRQIFLDQNMLAVIDELMQALNFNSETVPQKSSLEEPDFDKTKIKLCILLHAFRIRAVTIDRVMSYLNAS

SEQ ID NO: 133 - protein, 529 aa, Artificial Sequence; identical to SEQ ID NO: 131
  Made in Lab - attenuated protein heterodimer construct

SEQ ID NO: 134 - protein, 416 aa, Artificial Sequence
  Made in Lab - attenuated protein heterodimer construct
EIVLTQSPATLSLSPGERATLSCRASQSVSSYLAWYQQKPGQAPRLLIYDASNRATGIPARFSGSGSGTDFTLTISSLEPEDFAVYYCQQSSNWPRTFGQGTKVEIKRTVAAPSVFIFPPSDEQLKSGTASVVCLLNNFYPREAKVQWKVDNALQSGNSQESVTEQDSKDSTYSLSSTLTLSKADYEKHKVYACEVTHQGLSSPVTKSFNRGECGGGGSRNLPVATPDPGMFPCLHHSQNLLRAVSNMLQKARQTLEFYPCTSEEIDHEDITKDKTSTVEACLPLELTKNESSLNSRETSFITNGSCLASRKTSFMMALCLSSIYEDLKMYQVEFKTMNAKLLMDPKRQIFLDQNMLAVIDELMQALNFNSETVPQKSSLEEPDFEKTKIKLCILLHAFRIRAVTIDRVMSYLNAS

SEQ ID NO: 135 - protein, 529 aa, Artificial Sequence; identical to SEQ ID NO: 131
  Made in Lab - attenuated protein heterodimer construct

SEQ ID NO: 136 - protein, 416 aa, Artificial Sequence
  Made in Lab - attenuated protein heterodimer construct
EIVLTQSPATLSLSPGERATLSCRASQSVSSYLAWYQQKPGQAPRLLIYDASNRATGIPARFSGSGSGTDFTLTISSLEPEDFAVYYCQQSSNWPRTFGQGTKVEIKRTVAAPSVFIFPPSDEQLKSGTASVVCLLNNFYPREAKVQWKVDNALQSGNSQESVTEQDSKDSTYSLSSTLTLSKADYEKHKVYACEVTHQGLSSPVTKSFNRGECGGGGSRNLPVATPDPGMFPCLHHSQNLLRAVSNMLQKARQTLEFYPCTSEEIDHEDITKDKTSTVEACLPLELTKNESSLNSRETSFITNGSCLASRKTSFMMALCLSSIYEDLKMYQVEFKTMNAKLLMDPKRQIFLDQNMLAVIDELMQALNFNSETVPQKSSLEEPDFFKTKIKLCILLHAFRIRAVTIDRVMSYLNAS

SEQ ID NO: 137 - protein, 534 aa, Artificial Sequence; identical to SEQ ID NO: 112
  Made in Lab - attenuated protein heterodimer construct

SEQ ID NO: 138 - protein, 416 aa, Artificial Sequence
  Made in Lab - attenuated protein heterodimer construct
DIQMTQSPSSLSASVGDRVTITCRASQDVSTAVAWYQQKPGKAPKLLIYSASFLYSGVPSRFSGSGSGTDFTLTISSLQPEDFATYYCQQYLYHPATFGQGTKVEIKRTVAAPSVFIFPPSDEQLKSGTASVVCLLNNFYPREAKVQWKVDNALQSGNSQESVTEQDSKDSTYSLSSTLTLSKADYEKHKVYACEVTHQGLSSPVTKSFNRGECGGGGSRNLPVATPDPGMFPCLHHSQNLLRAVSNMLQKARQTLEFYPCTSEEIDHEDITKDKTSTVEACLPLELTKNESSLNSRETSFITNGSCLASRKTSFMMALCLSSIYEDLKMYQVEFKTMNAKLLMDPKRQIFLDQNMLAVIDELMQALNFNSETVPQKSSLEEPDFKKTKIKLCILLHAFRIRAVTIDRVMSYLNAS

SEQ ID NO: 139 - protein, 534 aa, Artificial Sequence; identical to SEQ ID NO: 112
  Made in Lab - attenuated protein heterodimer construct

SEQ ID NO: 140 - protein, 416 aa, Artificial Sequence
  Made in Lab - attenuated protein heterodimer construct
DIQMTQSPSSLSASVGDRVTITCRASQDVSTAVAWYQQKPGKAPKLLIYSASFLYSGVPSRFSGSGSGTDFTLTISSLQPEDFATYYCQQYLYHPATFGQGTKVEIKRTVAAPSVFIFPPSDEQLKSGTASVVCLLNNFYPREAKVQWKVDNALQSGNSQESVTEQDSKDSTYSLSSTLTLSKADYEKHKVYACEVTHQGLSSPVTKSFNRGECGGGGSRNLPVATPDPGMFPCLHHSQNLLRAVSNMLQKARQTLEFYPCTSEEIDHEDITKDKTSTVEACLPLELTKNESSLNSRETSFITNGSCLASRKTSFMMALCLSSIYEDLKMYQVEFKTMNAKLLMDPKRQIFLDQNMLAVIDELMQALNFNSETVPQKSSLEEPDFMKTKIKLCILLHAFRIRAVTIDRVMSYLNAS

SEQ ID NO: 141 - protein, 534 aa, Artificial Sequence; identical to SEQ ID NO: 112
  Made in Lab - attenuated protein heterodimer construct

SEQ ID NO: 142 - protein, 416 aa, Artificial Sequence
  Made in Lab - attenuated protein heterodimer construct
DIQMTQSPSSLSASVGDRVTITCRASQDVSTAVAWYQQKPGKAPKLLIYSASFLYSGVPSRFSGSGSGTDFTLTISSLQPEDFATYYCQQYLYHPATFGQGTKVEIKRTVAAPSVFIFPPSDEQLKSGTASVVCLLNNFYPREAKVQWKVDNALQSGNSQESVTEQDSKDSTYSLSSTLTLSKADYEKHKVYACEVTHQGLSSPVTKSFNRGECGGGGSRNLPVATPDPGMFPCLHHSQNLLRAVSNMLQKARQTLEFYPCTSEEIDHEDITKDKTSTVEACLPLELTKNESSLNSRETSFITNGSCLASRKTSFMMALCLSSIYEDLKMYQVEFKTMNAKLLMDPKRQIFLDQNMLAVIDELMQALNFNSETVPQKSSLEEPDFPKTKIKLCILLHAFRIRAVTIDRVMSYLNAS

SEQ ID NO: 143 - protein, 534 aa, Artificial Sequence; identical to SEQ ID NO: 112
  Made in Lab - attenuated protein heterodimer construct

SEQ ID NO: 144 - protein, 416 aa, Artificial Sequence
  Made in Lab - attenuated protein heterodimer construct
DIQMTQSPSSLSASVGDRVTITCRASQDVSTAVAWYQQKPGKAPKLLIYSASFLYSGVPSRFSGSGSGTDFTLTISSLQPEDFATYYCQQYLYHPATFGQGTKVEIKRTVAAPSVFIFPPSDEQLKSGTASVVCLLNNFYPREAKVQWKVDNALQSGNSQESVTEQDSKDSTYSLSSTLTLSKADYEKHKVYACEVTHQGLSSPVTKSFNRGECGGGGSRNLPVATPDPGMFPCLHHSQNLLRAVSNMLQKARQTLEFYPCTSEEIDHEDITKDKTSTVEACLPLELTKNESSLNSRETSFITNGSCLASRKTSFMMALCLSSIYEDLKMYQVEFKTMNAKLLMDPKRQIFLDQNMLAVIDELMQALNFNSETVPQKSSLEEPDFRKTKIKLCILLHAFRIRAVTIDRVMSYLNAS

SEQ ID NO: 145 - protein, 534 aa, Artificial Sequence; identical to SEQ ID NO: 112
  Made in Lab - attenuated protein heterodimer construct

SEQ ID NO: 146 - protein, 416 aa, Artificial Sequence
  Made in Lab - attenuated protein heterodimer construct
DIQMTQSPSSLSASVGDRVTITCRASQDVSTAVAWYQQKPGKAPKLLIYSASFLYSGVPSRFSGSGSGTDFTLTISSLQPEDFATYYCQQYLYHPATFGQGTKVEIKRTVAAPSVFIFPPSDEQLKSGTASVVCLLNNFYPREAKVQWKVDNALQSGNSQESVTEQDSKDSTYSLSSTLTLSKADYEKHKVYACEVTHQGLSSPVTKSFNRGECGGGGSRNLPVATPDPGMFPCLHHSQNLLRAVSNMLQKARQTLEFYPCTSEEIDHEDITKDKTSTVEACLPLELTKNESSLNSRETSFITNGSCLASRKTSFMMALCLSSIYEDLKMYQVEFKTMNAKLLMDPKRQIFLDQNMLAVIDELMQALNFNSETVPQKSSLEEPDFWKTKIKLCILLHAFRIRAVTIDRVMSYLNAS

SEQ ID NO: 147 - protein, 546 aa, Artificial Sequence
  Made in Lab - attenuated protein heterodimer construct
EVQLVESGGGLVQPGGSLRLSCAASGFTFSDSWIHWVRQAPGKGLEWVAWISPYGGSTYYADSVKGRFTISADTSKNTAYLQMNSLRAEDTAVYYCARRHWPGGFDYWGQGTLVTVSSASTKGPSVFPLAPSSKSTSGGTAALGCLVKDYFPEPVTVSWNSGALTSGVHTFPAVLQSSGLYSLSSVVTVPSSSLGTQTYICNVNHKPSNTKVDKKVEPKSCDKGGGGSSGRSDNRGGGGSIWELKKDVYVVELDWYPDAPGEMVVLTCDTPEEDGITWTLDQSSEVLGSGKTLTIQVKEFGDAGQYTCHKGGEVLSHSLLLLHKKEDGIWSTDILKDQKEPKNKTFLRCEAKNYSGRFTCWWLTTISTDLTFSVKSSRGSSDPQGVTCGAATLSAERVRGDNKEYEYSVECQEDSAAPAAEESLPIEVMVDAVHKLKYENYTSSFFIRDIIKPDPPKNLQLKPLKNSRQVEVSWEYPDTWSTPHSYFSLTFSVQVQGQDQDEKKDRVFTDKTSATVICRKNASISVRAQDRYYSSSWSEWASVPCS

SEQ ID NO: 148 - protein, 416 aa, Artificial Sequence; identical to SEQ ID NO: 111
  Made in Lab - attenuated protein heterodimer construct

SEQ ID NO: 149 - protein, 546 aa, Artificial Sequence; identical to SEQ ID NO: 147
  Made in Lab - attenuated protein heterodimer construct

SEQ ID NO: 150 - protein, 422 aa, Artificial Sequence
  Made in Lab - attenuated protein heterodimer construct
DIQMTQSPSSLSASVGDRVTITCRASQDVSTAVAWYQQKPGKAPKLLIYSASFLYSGVPSRFSGSGSGTDFTLTISSLQPEDFATYYCQQYLYHPATFGQGTKVEIKRTVAAPSVFIFPPSDEQLKSGTASVVCLLNNFYPREAKVQWKVDNALQSGNSQESVTEQDSKDSTYSLSSTLTLSKADYEKHKVYACEVTHQGLSSPVTKSFNRGECGGGGSPLGLAGRNLPVATPDPGMFPCLHHSQNLLRAVSNMLQKARQTLEFYPCTSEEIDHEDITKDKTSTVEACLPLELTKNESSLNSRETSFITNGSCLASRKTSFMMALCLSSIYEDLKMYQVEFKTMNAKLLMDPKRQIFLDQNMLAVIDELMQALNFNSETVPQKSSLEEPDFYKTKIKLCILLHAFRIRAVTIDRVMSYLNAS

SEQ ID NO: 151 - protein, 548 aa, Artificial Sequence
  Made in Lab - attenuated protein heterodimer construct
QVQLVQSGAEVKKPGASVKVSCKASGYTFTMNIIHWVRQAPGQGLEWMGWIHPGSGAIKYAQKLQGRVTMTTDTSTSTAYMELRSLRSDDTAVYYCARHGGTGRGAMDYWGQGTLVTVSSASTKGPSVFPLAPSSKSTSGGTAALGCLVKDYFPEPVTVSWNSGALTSGVHTFPAVLQSSGLYSLSSVVTVPSSSLGTQTYICNVNHKPSNTKVDKKVEPKSCDKGGGGSSGRSDNRGGGGSIWELKKDVYVVELDWYPDAPGEMVVLTCDTPEEDGITWTLDQSSEVLGSGKTLTIQVKEFGDAGQYTCHKGGEVLSHSLLLLHKKEDGIWSTDILKDQKEPKNKTFLRCEAKNYSGRFTCWWLTTISTDLTFSVKSSRGSSDPQGVTCGAATLSAERVRGDNKEYEYSVECQEDSAAPAAEESLPIEVMVDAVHKLKYENYTSSFFIRDIIKPDPPKNLQLKPLKNSRQVEVSWEYPDTWSTPHSYFSLTFSVQVQGQDQDEKKDRVFTDKTSATVICRKNASISVRAQDRYYSSSWSEWASVPCS

SEQ ID NO: 152 - protein, 420 aa, Artificial Sequence
  Made in Lab - attenuated protein heterodimer construct
EIVLTQSPGTLSLSPGERATLSCRASQSVSTSAYSYMHWYQQKPGQAPRLLIYLASNLESGIPDRFSGSGSGTDFTLTISRLEPEDFAVYYCQQSRELPYTFGQGTKLEIKRTVAAPSVFIFPPSDEQLKSGTASVVCLLNNFYPREAKVQWKVDNALQSGNSQESVTEQDSKDSTYSLSSTLTLSKADYEKHKVYACEVTHQGLSSPVTKSFNRGECGGGGSRNLPVATPDPGMFPCLHHSQNLLRAVSNMLQKARQTLEFYPCTSEEIDHEDITKDKTSTVEACLPLELTKNESSLNSRETSFITNGSCLASRKTSFMMALCLSSIYEDLKMYQVEFKTMNAKLLMDPKRQIFLDQNMLAVIDELMQALNFNSETVPQKSSLEEPDFYKTKIKLCILLHAFRIRAVTIDRVMSYLNAS

SEQ ID NO: 153 - protein, 548 aa, Artificial Sequence; identical to SEQ ID NO: 151
  Made in Lab - attenuated protein heterodimer construct

SEQ ID NO: 154 - protein, 426 aa, Artificial Sequence
  Made in Lab - attenuated protein heterodimer construct
EIVLTQSPGTLSLSPGERATLSCRASQSVSTSAYSYMHWYQQKPGQAPRLLIYLASNLESGIPDRFSGSGSGTDFTLTISRLEPEDFAVYYCQQSRELPYTFGQGTKLEIKRTVAAPSVFIFPPSDEQLKSGTASVVCLLNNFYPREAKVQWKVDNALQSGNSQESVTEQDSKDSTYSLSSTLTLSKADYEKHKVYACEVTHQGLSSPVTKSFNRGECGGGGSPLGLAGRNLPVATPDPGMFPCLHHSQNLLRAVSNMLQKARQTLEFYPCTSEEIDHEDITKDKTSTVEACLPLELTKNESSLNSRETSFITNGSCLASRKTSFMMALCLSSIYEDLKMYQVEFKTMNAKLLMDPKRQIFLDQNMLAVIDELMQALNFNSETVPQKSSLEEPDFYKTKIKLCILLHAFRIRAVTIDRVMSYLNAS

SEQ ID NO: 155 - protein, 551 aa, Artificial Sequence
  Made in Lab - attenuated protein heterodimer construct
QVQLVQSGAEVKKPGSSVKVSCKTSGDTFSTYAISWVRQAPGQGLEWMGGIIPIFGKAHYAQKFQGRVTITADESTSTAYMELSSLRSEDTAVYFCARKFHFVSGSPFGMDVWGQGTTVTVSSASTKGPSVFPLAPSSKSTSGGTAALGCLVKDYFPEPVTVSWNSGALTSGVHTFPAVLQSSGLYSLSSVVTVPSSSLGTQTYICNVNHKPSNTKVDKKVEPKSCDKGGGGSSGRSDNRGGGGSIWELKKDVYVVELDWYPDAPGEMVVLTCDTPEEDGITWTLDQSSEVLGSGKTLTIQVKEFGDAGQYTCHKGGEVLSHSLLLLHKKEDGIWSTDILKDQKEPKNKTFLRCEAKNYSGRFTCWWLTTISTDLTFSVKSSRGSSDPQGVTCGAATLSAERVRGDNKEYEYSVECQEDSAAPAAEESLPIEVMVDAVHKLKYENYTSSFFIRDIIKPDPPKNLQLKPLKNSRQVEVSWEYPDTWSTPHSYFSLTFSVQVQGQDQDEKKDRVFTDKTSATVICRKNASISVRAQDRYYSSSWSEWASVPCS

SEQ ID NO: 156 - protein, 415 aa, Artificial Sequence
  Made in Lab - attenuated protein heterodimer construct
EIVLTQSPATLSLSPGERATLSCRASQSVSSYLAWYQQKPGQAPRLLIYDASNRATGIPARFSGSGSGTDFTLTISSLEPEDFAVYYCQQRSNWPTFGQGTKVEIKRTVAAPSVFIFPPSDEQLKSGTASVVCLLNNFYPREAKVQWKVDNALQSGNSQESVTEQDSKDSTYSLSSTLTLSKADYEKHKVYACEVTHQGLSSPVTKSFNRGECGGGGSRNLPVATPDPGMFPCLHHSQNLLRAVSNMLQKARQTLEFYPCTSEEIDHEDITKDKTSTVEACLPLELTKNESSLNSRETSFITNGSCLASRKTSFMMALCLSSIYEDLKMYQVEFKTMNAKLLMDPKRQIFLDQNMLAVIDELMQALNFNSETVPQKSSLEEPDFYKTKIKLCILLHAFRIRAVTIDRVMSYLNAS

SEQ ID NO: 157 - protein, 556 aa, Artificial Sequence
  Made in Lab - attenuated protein heterodimer construct
QVQLVQSGAEVKKPGSSVKVSCKTSGDTFSTYAISWVRQAPGQGLEWMGGIIPIFGKAHYAQKFQGRVTITADESTSTAYMELSSLRSEDTAVYFCARKFHFVSGSPFGMDVWGQGTTVTVSSASTKGPSVFPLAPSSKSTSGGTAALGCLVKDYFPEPVTVSWNSGALTSGVHTFPAVLQSSGLYSLSSVVTVPSSSLGTQTYICNVNHKPSNTKVDKKVEPKSCDKGGSPLGLAGLSGRSDNRGGGGSIWELKKDVYVVELDWYPDAPGEMVVLTCDTPEEDGITWTLDQSSEVLGSGKTLTIQVKEFGDAGQYTCHKGGEVLSHSLLLLHKKEDGIWSTDILKDQKEPKNKTFLRCEAKNYSGRFTCWWLTTISTDLTFSVKSSRGSSDPQGVTCGAATLSAERVRGDNKEYEYSVECQEDSAAPAAEESLPIEVMVDAVHKLKYENYTSSFFIRDIIKPDPPKNLQLKPLKNSRQVEVSWEYPDTWSTPHSYFSLTFSVQVQGQDQDEKKDRVFTDKTSATVICRKNASISVRAQDRYYSSSWSEWASVPCS

SEQ ID NO: 158 - protein, 415 aa, Artificial Sequence; identical to SEQ ID NO: 156
  Made in Lab - attenuated protein heterodimer construct

SEQ ID NO: 159 - protein, 545 aa, Artificial Sequence
  Made in Lab - attenuated protein heterodimer construct
QVQLVQSGSELKKPGASVKVSCKASGYTFTNYDINWVRQAPGQGLEWMGWIFPGDESTQYNEKFKGRFVFSLDTSVSTAYLQISSLKAEDTAVYYCARQTTGTWFAYWGQGTLVTVSASTKGPSVFPLAPSSKSTSGGTAALGCLVKDYFPEPVTVSWNSGALTSGVHTFPAVLQSSGLYSLSSVVTVPSSSLGTQTYICNVNHKPSNTKVDKKVEPKSCDKGGGGSSGRSDNRGGGGSIWELKKDVYVVELDWYPDAPGEMVVLTCDTPEEDGITWTLDQSSEVLGSGKTLTIQVKEFGDAGQYTCHKGGEVLSHSLLLLHKKEDGIWSTDILKDQKEPKNKTFLRCEAKNYSGRFTCWWLTTISTDLTFSVKSSRGSSDPQGVTCGAATLSAERVRGDNKEYEYSVECQEDSAAPAAEESLPIEVMVDAVHKLKYENYTSSFFIRDIIKPDPPKNLQLKPLKNSRQVEVSWEYPDTWSTPHSYFSLTFSVQVQGQDQDEKKDRVFTDKTSATVICRKNASISVRAQDRYYSSSWSEWASVPCS

SEQ ID NO: 160 - protein, 416 aa, Artificial Sequence
  Made in Lab - attenuated protein heterodimer construct
DVVMTQSPAFLSVTPGEKVTITCRASQSISDYLYWYQQKPDQAPKLLIKYASQSISGIPARFSGSGSGTDFTFTISSLEAEDAATYYCQNGHSFPLTFGQGTKLELKRTVAAPSVFIFPPSDEQLKSGTASVVCLLNNFYPREAKVQWKVDNALQSGNSQESVTEQDSKDSTYSLSSTLTLSKADYEKHKVYACEVTHQGLSSPVTKSFNRGECGGGGSRNLPVATPDPGMFPCLHHSQNLLRAVSNMLQKARQTLEFYPCTSEEIDHEDITKDKTSTVEACLPLELTKNESSLNSRETSFITNGSCLASRKTSFMMALCLSSIYEDLKMYQVEFKTMNAKLLMDPKRQIFLDQNMLAVIDELMQALNFNSETVPQKSSLEEPDFYKTKIKLCILLHAFRIRAVTIDRVMSYLNAS

SEQ ID NO: 161 - protein, 550 aa, Artificial Sequence
  Made in Lab - attenuated protein heterodimer construct
QVQLVQSGSELKKPGASVKVSCKASGYTFTNYDINWVRQAPGQGLEWMGWIFPGDESTQYNEKFKGRFVFSLDTSVSTAYLQISSLKAEDTAVYYCARQTTGTWFAYWGQGTLVTVSASTKGPSVFPLAPSSKSTSGGTAALGCLVKDYFPEPVTVSWNSGALTSGVHTFPAVLQSSGLYSLSSVVTVPSSSLGTQTYICNVNHKPSNTKVDKKVEPKSCDKGGSPLGLAGLSGRSDNRGGGGSIWELKKDVYVVELDWYPDAPGEMVVLTCDTPEEDGITWTLDQSSEVLGSGKTLTIQVKEFGDAGQYTCHKGGEVLSHSLLLLHKKEDGIWSTDILKDQKEPKNKTFLRCEAKNYSGRFTCWWLTTISTDLTFSVKSSRGSSDPQGVTCGAATLSAERVRGDNKEYEYSVECQEDSAAPAAEESLPIEVMVDAVHKLKYENYTSSFFIRDIIKPDPPKNLQLKPLKNSRQVEVSWEYPDTWSTPHSYFSLTFSVQVQGQDQDEKKDRVFTDKTSATVICRKNASISVRAQDRYYSSSWSEWASVPCS

SEQ ID NO: 162 - protein, 416 aa, Artificial Sequence; identical to SEQ ID NO: 160
  Made in Lab - attenuated protein heterodimer construct

SEQ ID NO: 163 - protein, 774 aa, Artificial Sequence
  Made in Lab - attenuated protein heterodimer construct
QVQLVQSGSELKKPGASVKVSCKASGYTFTNYDINWVRQAPGQGLEWMGWIFPGDESTQYNEKFKGRFVFSLDTSVSTAYLQISSLKAEDTAVYYCARQTTGTWFAYWGQGTLVTVSASTKGPSVFPLAPSSKSTSGGTAALGCLVKDYFPEPVTVSWNSGALTSGVHTFPAVLQSSGLYSLSSVVTVPSSSLGTQTYICNVNHKPSNTKVDKKVEPKSCDKESKYGPPCPPCPAPEFLGGPSVFLFPPKPKDTLMISRTPEVTCVVVDVSQEDPEVQFNWYVDGVEVHNAKTKPREEQFNSTYRVVSVLTVLHQDWLNGKEYKCKVSNKGLPSSIEKTISKAKGQPREPQVYTLPPCQEEMTKNQVSLWCLVKGFYPSDIAVEWESNGQPENNYKTTPPVLDSDGSFFLYSRLTVDKSRWQEGNVFSCSVMHEALHNHYTQKSLSLSLGGGGGSLSGRSDNRGGGGSIWELKKDVYVVELDWYPDAPGEMVVLTCDTPEEDGITWTLDQSSEVLGSGKTLTIQVKEFGDAGQYTCHKGGEVLSHSLLLLHKKEDGIWSTDILKDQKEPKNKTFLRCEAKNYSGRFTCWWLTTISTDLTFSVKSSRGSSDPQGVTCGAATLSAERVRGDNKEYEYSVECQEDSAAPAAEESLPIEVMVDAVHKLKYENYTSSFFIRDIIKPDPPKNLQLKPLKNSRQVEVSWEYPDTWSTPHSYFSLTFSVQVQGQDQDEKKDRVFTDKTSATVICRKNASISVRAQDRYYSSSWSEWASVPCS

SEQ ID NO: 164 - protein, 644 aa, Artificial Sequence
  Made in Lab - attenuated protein heterodimer construct
DVVMTQSPAFLSVTPGEKVTITCRASQSISDYLYWYQQKPDQAPKLLIKYASQSISGIPARFSGSGSGTDFTFTISSLEAEDAATYYCQNGHSFPLTFGQGTKLELKRTVAAPSVFIFPPSDEQLKSGTASVVCLLNNFYPREAKVQWKVDNALQSGNSQESVTEQDSKDSTYSLSSTLTLSKADYEKHKVYACEVTHQGLSSPVTKSFNRGECESKYGPPCPPCPAPEFLGGPSVFLFPPKPKDTLMISRTPEVTCVVVDVSQEDPEVQFNWYVDGVEVHNAKTKPREEQFNSTYRVVSVLTVLHQDWLNGKEYKCKVSNKGLPSSIEKTISKAKGQPREPQVCTLPPSQEEMTKNQVSLSCAVKGFYPSDIAVEWESNGQPENNYKTTPPVLDSDGSFFLVSRLTVDKSRWQEGNVFSCSVMHEALHNHYTQKSLSLSLGGGGGSRNLPVATPDPGMFPCLHHSQNLLRAVSNMLQKARQTLEFYPCTSEEIDHEDITKDKTSTVEACLPLELTKNESSLNSRETSFITNGSCLASRKTSFMMALCLSSIYEDLKMYQVEFKTMNAKLLMDPKRQIFLDQNMLAVIDELMQALNFNSETVPQKSSLEEPDFYKTKIKLCILLHAFRIRAVTIDRVMSYLNAS

SEQ ID NO: 165 - protein, 545 aa, Artificial Sequence
  Made in Lab - attenuated protein heterodimer construct
QVQLVQSGSELKKPGASVKVSCKASGYTFTNYDINWVRQAPGQGLEWMGWIFPGDESTQYNEKFKGRFVFSLDTSVSTAYLQISSLKAEDTAVYYCARQTTGTWFAYWGQGTLVTVSASTKGPSVFPLAPSSKSTSGGTAALGCLVKDYFPEPVTVSWNSGALTSGVHTFPAVLQSSGLYSLSSVVTVPSSSLGTQTYICNVNHKPSNTKVDKKVEPKSCDKGGGGSSGRSDNRGGGGSIWELKKDVYVVELDWYPDAPGEMVVLTCDTPEEDGITWTLDQSSEVLGSGKTLTIQVKEFGDAGQYTCHKGGEVLSHSLLLLHKKEDGIWSTDILKDQKEPKNKTFLRCEAKNYSGRFTCWWLTTISTDLTFSVKSSRGSSDPQGVTCGAATLSAERVRGDNKEYEYSVECQEDSAAPAAEESLPIEVMVDAVHKLKYENYTSSFFIRDIIKPDPPKNLQLKPLKNSRQVEVSWEYPDTWSTPHSYFSLTFSVQVQGKSKREKKDRVFTDKTSATVICRKNASISVRAQDRYYSSSWSEWASVPCS

SEQ ID NO: 166 - protein, 416 aa, Artificial Sequence; identical to SEQ ID NO: 160
  Made in Lab - attenuated protein heterodimer construct

SEQ ID NO: 167 - protein, 550 aa, Artificial Sequence
  Made in Lab - attenuated protein heterodimer construct
QVQLVQSGSELKKPGASVKVSCKASGYTFTNYDINWVRQAPGQGLEWMGWIFPGDESTQYNEKFKGRFVFSLDTSVSTAYLQISSLKAEDTAVYYCARQTTGTWFAYWGQGTLVTVSASTKGPSVFPLAPSSKSTSGGTAALGCLVKDYFPEPVTVSWNSGALTSGVHTFPAVLQSSGLYSLSSVVTVPSSSLGTQTYICNVNHKPSNTKVDKKVEPKSCDKGGSPLGLAGLSGRSDNRGGGGSIWELKKDVYVVELDWYPDAPGEMVVLTCDTPEEDGITWTLDQSSEVLGSGKTLTIQVKEFGDAGQYTCHKGGEVLSHSLLLLHKKEDGIWSTDILKDQKEPKNKTFLRCEAKNYSGRFTCWWLTTISTDLTFSVKSSRGSSDPQGVTCGAATLSAERVRGDNKEYEYSVECQEDSAAPAAEESLPIEVMVDAVHKLKYENYTSSFFIRDIIKPDPPKNLQLKPLKNSRQVEVSWEYPDTWSTPHSYFSLTFSVQVQGKSKREKKDRVFTDKTSATVICRKNASISVRAQDRYYSSSWSEWASVPCS

SEQ ID NO: 168 - protein, 416 aa, Artificial Sequence; identical to SEQ ID NO: 160
  Made in Lab - attenuated protein heterodimer construct

SEQ ID NO: 169 - protein, 774 aa, Artificial Sequence
  Made in Lab - attenuated protein heterodimer construct
QVQLVQSGSELKKPGASVKVSCKASGYTFTNYDINWVRQAPGQGLEWMGWIFPGDESTQYNEKFKGRFVFSLDTSVSTAYLQISSLKAEDTAVYYCARQTTGTWFAYWGQGTLVTVSASTKGPSVFPLAPSSKSTSGGTAALGCLVKDYFPEPVTVSWNSGALTSGVHTFPAVLQSSGLYSLSSVVTVPSSSLGTQTYICNVNHKPSNTKVDKKVEPKSCDKESKYGPPCPPCPAPEFLGGPSVFLFPPKPKDTLMISRTPEVTCVVVDVSQEDPEVQFNWYVDGVEVHNAKTKPREEQFNSTYRVVSVLTVLHQDWLNGKEYKCKVSNKGLPSSIEKTISKAKGQPREPQVYTLPPCQEEMTKNQVSLWCLVKGFYPSDIAVEWESNGQPENNYKTTPPVLDSDGSFFLYSRLTVDKSRWQEGNVFSCSVMHEALHNHYTQKSLSLSLGGGGGSLSGRSDNRGGGGSIWELKKDVYVVELDWYPDAPGEMVVLTCDTPEEDGITWTLDQSSEVLGSGKTLTIQVKEFGDAGQYTCHKGGEVLSHSLLLLHKKEDGIWSTDILKDQKEPKNKTFLRCEAKNYSGRFTCWWLTTISTDLTFSVKSSRGSSDPQGVTCGAATLSAERVRGDNKEYEYSVECQEDSAAPAAEESLPIEVMVDAVHKLKYENYTSSFFIRDIIKPDPPKNLQLKPLKNSRQVEVSWEYPDTWSTPHSYFSLTFSVQVQGKSKREKKDRVFTDKTSATVICRKNASISVRAQDRYYSSSWSEWASVPCS

SEQ ID NO: 170 - protein, 644 aa, Artificial Sequence; identical to SEQ ID NO: 164
  Made in Lab - attenuated protein heterodimer construct

SEQ ID NO: 171 - protein, 778 aa, Artificial Sequence
  Made in Lab - attenuated protein heterodimer construct
QVQLVQSGSELKKPGASVKVSCKASGYTFTNYDINWVRQAPGQGLEWMGWIFPGDESTQYNEKFKGRFVFSLDTSVSTAYLQISSLKAEDTAVYYCARQTTGTWFAYWGQGTLVTVSASTKGPSVFPLAPSSKSTSGGTAALGCLVKDYFPEPVTVSWNSGALTSGVHTFPAVLQSSGLYSLSSVVTVPSSSLGTQTYICNVNHKPSNTKVDKKVEPKSCDKESKYGPPCPPCPAPEFLGGPSVFLFPPKPKDTLMISRTPEVTCVVVDVSQEDPEVQFNWYVDGVEVHNAKTKPREEQFNSTYRVVSVLTVLHQDWLNGKEYKCKVSNKGLPSSIEKTISKAKGQPREPQVYTLPPCQEEMTKNQVSLWCLVKGFYPSDIAVEWESNGQPENNYKTTPPVLDSDGSFFLYSRLTVDKSRWQEGNVFSCSVMHEALHNHYTQKSLSLSLGGGSPLGLAGLSGRSDNRGGGGSIWELKKDVYVVELDWYPDAPGEMVVLTCDTPEEDGITWTLDQSSEVLGSGKTLTIQVKEFGDAGQYTCHKGGEVLSHSLLLLHKKEDGIWSTDILKDQKEPKNKTFLRCEAKNYSGRFTCWWLTTISTDLTFSVKSSRGSSDPQGVTCGAATLSAERVRGDNKEYEYSVECQEDSAAPAAEESLPIEVMVDAVHKLKYENYTSSFFIRDIIKPDPPKNLQLKPLKNSRQVEVSWEYPDTWSTPHSYFSLTFSVQVQGKSKREKKDRVFTDKTSATVICRKNASISVRAQDRYYSSSWSEWASVPCS

SEQ ID NO: 172 - protein, 644 aa, Artificial Sequence; identical to SEQ ID NO: 164
  Made in Lab - attenuated protein heterodimer construct

SEQ ID NO: 173 - protein, 761 aa, Artificial Sequence
  Made in Lab - attenuated protein heterodimer construct
QVQLVQSGSELKKPGASVKVSCKASGYTFTNYDINWVRQAPGQGLEWMGWIFPGDESTQYNEKFKGRFVFSLDTSVSTAYLQISSLKAEDTAVYYCARQTTGTWFAYWGQGTLVTVSASTKGPSVFPLAPSSKSTSGGTAALGCLVKDYFPEPVTVSWNSGALTSGVHTFPAVLQSSGLYSLSSVVTVPSSSLGTQTYICNVNHKPSNTKVDKKVEPKSCDKESKYGPPCPPCPAPEFLGGPSVFLFPPKPKDTLMISRTPEVTCVVVDVSQEDPEVQFNWYVDGVEVHNAKTKPREEQFNSTYRVVSVLTVLHQDWLNGKEYKCKVSNKGLPSSIEKTISKAKGQPREPQVYTLPPCQEEMTKNQVSLWCLVKGFYPSDIAVEWESNGQPENNYKTTPPVLDSDGSFFLYSRLTVDKSRWQEGNVFSCSVMHEALHNHYTQKSLSLSLGGGGGSIWELKKDVYVVELDWYPDAPGEMVVLTCDTPEEDGITWTLDQSSEVLGSGKTLTIQVKEFGDAGQYTCHKGGEVLSHSLLLLHKKEDGIWSTDILKDQKEPKNKTFLRCEAKNYSGRFTCWWLTTISTDLTFSVKSSRGSSDPQGVTCGAATLSAERVRGDNKEYEYSVECQEDSAAPAAEESLPIEVMVDAVHKLKYENYTSSFFIRDIIKPDPPKNLQLKPLKNSRQVEVSWEYPDTWSTPHSYFSLTFSVQVQGQDQDEKKDRVFTDKTSATVICRKNASISVRAQDRYYSSSWSEWASVPCS

SEQ ID NO: 174 - protein, 644 aa, Artificial Sequence; identical to SEQ ID NO: 164
  Made in Lab - attenuated protein heterodimer construct

SEQ ID NO: 175 - protein, 761 aa, Artificial Sequence
  Made in Lab - attenuated protein heterodimer construct
QVQLVQSGSELKKPGASVKVSCKASGYTFTNYDINWVRQAPGQGLEWMGWIFPGDESTQYNEKFKGRFVFSLDTSVSTAYLQISSLKAEDTAVYYCARQTTGTWFAYWGQGTLVTVSASTKGPSVFPLAPSSKSTSGGTAALGCLVKDYFPEPVTVSWNSGALTSGVHTFPAVLQSSGLYSLSSVVTVPSSSLGTQTYICNVNHKPSNTKVDKKVEPKSCDKESKYGPPCPPCPAPEFLGGPSVFLFPPKPKDTLMISRTPEVTCVVVDVSQEDPEVQFNWYVDGVEVHNAKTKPREEQFNSTYRVVSVLTVLHQDWLNGKEYKCKVSNKGLPSSIEKTISKAKGQPREPQVYTLPPCQEEMTKNQVSLWCLVKGFYPSDIAVEWESNGQPENNYKTTPPVLDSDGSFFLYSRLTVDKSRWQEGNVFSCSVMHEALHNHYTQKSLSLSLGGGGGSIWELKKDVYVVELDWYPDAPGEMVVLTCDTPEEDGITWTLDQSSEVLGSGKTLTIQVKEFGDAGQYTCHKGGEVLSHSLLLLHKKEDGIWSTDILKDQKEPKNKTFLRCEAKNYSGRFTCWWLTTISTDLTFSVKSSRGSSDPQGVTCGAATLSAERVRGDNKEYEYSVECQEDSAAPAAEESLPIEVMVDAVHKLKYENYTSSFFIRDIIKPDPPKNLQLKPLKNSRQVEVSWEYPDTWSTPHSYFSLTFSVQVQGKSKREKKDRVFTDKTSATVICRKNASISVRAQDRYYSSSWSEWASVPCS

SEQ ID NO: 176 - protein, 644 aa, Artificial Sequence; identical to SEQ ID NO: 164
  Made in Lab - attenuated protein heterodimer construct

SEQ ID NO: 177 - protein, 550 aa, Artificial Sequence
  Made in Lab - attenuated protein heterodimer construct
QVQLVQSGSELKKPGASVKVSCKASGYTFTNYDINWVRQAPGQGLEWMGWIFPGDESTQYNEKFKGRFVFSLDTSVSTAYLQISSLKAEDTAVYYCARQTTATWFAYWGQGTLVTVSASTKGPSVFPLAPSSKSTSGGTAALGCLVKDYFPEPVTVSWNSGALTSGVHTFPAVLQSSGLYSLSSVVTVPSSSLGTQTYICNVNHKPSNTKVDKKVEPKSCDKGGSPLGLAGLSGRSDNRGGGGSIWELKKDVYVVELDWYPDAPGEMVVLTCDTPEEDGITWTLDQSSEVLGSGKTLTIQVKEFGDAGQYTCHKGGEVLSHSLLLLHKKEDGIWSTDILKDQKEPKNKTFLRCEAKNYSGRFTCWWLTTISTDLTFSVKSSRGSSDPQGVTCGAATLSAERVRGDNKEYEYSVECQEDSAAPAAEESLPIEVMVDAVHKLKYENYTSSFFIRDIIKPDPPKNLQLKPLKNSRQVEVSWEYPDTWSTPHSYFSLTFSVQVQGQDQDEKKDRVFTDKTSATVICRKNASISVRAQDRYYSSSWSEWASVPCS

SEQ ID NO: 178 - protein, 426 aa, Artificial Sequence
  Made in Lab - attenuated protein heterodimer construct
DVVMTQSPAFLSVTPGEKVTITCRASQSISDYLHWYQQKPDQAPKLLIKYASQSISGIPARFSGSGSGTDFTFTISSLEAEDAATYYCQNGHSFPLTFGQGTKLELKRTVAAPSVFIFPPSDEQLKSGTASVVCLLNNFYPREAKVQWKVDNALQSGNSQESVTEQDSKDSTYSLSSTLTLSKADYEKHKVYACEVTHQGLSSPVTKSFNRGECGGGGSGGGGSGGGGSRNLPVATPDPGMFPCLHHSQNLLRAVSNMLQKARQTLEFYPCTSEEIDHEDITKDKTSTVEACLPLELTKNESSLNSRETSFITNGSCLASRKTSFMMALCLSSIYEDLKMYQVEFKTMNAKLLMDPKRQIFLDQNMLAVIDELMQALNFNSETVPQKSSLEEPDFYKTKIKLCILLHAFRIRAVTIDRVMSYLNAS

SEQ ID NO: 179 - protein, 553 aa, Artificial Sequence
  Made in Lab - attenuated protein heterodimer construct
QVQLVQSGSELKKPGASVKVSCKASGYTFTNYDINWVRQAPGQGLEWMGWIFPGDESTQYNEKFKGRFVFSLDTSVSTAYLQISSLKAEDTAVYYCARQTTATWFAYWGQGTLVTVSASTKGPSVFPLAPSSKSTSGGTAALGCLVKDYFPEPVTVSWNSGALTSGVHTFPAVLQSSGLYSLSSVVTVPSSSLGTQTYICNVNHKPSNTKVDKKVEPKSCDKGGGGSGGGGSGGGGSGGGGSGGGGSIWELKKDVYVVELDWYPDAPGEMVVLTCDTPEEDGITWTLDQSSEVLGSGKTLTIQVKEFGDAGQYTCHKGGEVLSHSLLLLHKKEDGIWSTDILKDQKEPKNKTFLRCEAKNYSGRFTCWWLTTISTDLTFSVKSSRGSSDPQGVTCGAATLSAERVRGDNKEYEYSVECQEDSAAPAAEESLPIEVMVDAVHKLKYENYTSSFFIRDIIKPDPPKNLQLKPLKNSRQVEVSWEYPDTWSTPHSYFSLTFSVQVQGQDQDEKKDRVFTDKTSATVICRKNASISVRAQDRYYSSSWSEWASVPCS

SEQ ID NO: 180 - protein, 426 aa, Artificial Sequence; identical to SEQ ID NO: 178
  Made in Lab - attenuated protein heterodimer construct

SEQ ID NO: 181 - protein, 550 aa, Artificial Sequence
  Made in Lab - attenuated protein heterodimer construct
QVQLVQSGSELKKPGASVKVSCKASGYTFTNYDINWVRQAPGQGLEWMGWIFPGDESTQYNEKFKGRFVFSLDTSVSTAYLQISSLKAEDTAVYYCARQTTATWFAYWGQGTLVTVSASTKGPSVFPLAPSSKSTSGGTAALGCLVKDYFPEPVTVSWNSGALTSGVHTFPAVLQSSGLYSLSSVVTVPSSSLGTQTYICNVNHKPSNTKVDKKVEPKSCDKGGSPLGLAGLSGRSDNRGGGGSIWELKKDVYVVELDWYPDAPGEMVVLTCDTPEEDGITWTLDQSSEVLGSGKTLTIQVKEFGDAGQYTCHKGGEVLSHSLLLLHKKEDGIWSTDILKDQKEPKNKTFLRCEAKNYSGRFTCWWLTTISTDLTFSVKSSRGSSDPQGVTCGAATLSAERVRGDNKEYEYSVECQEDSACPAAEESLPIEVMVDAVHKLKYENYTSSFFIRDIIKPDPPKNLQLKPLKNSRQVEVSWEYPDTWSTPHSYFSLTFSVQVQGKSKREKKDRVFTDKTSATVICRKNASISVRAQDRYYSSSWSEWASVPCS

SEQ ID NO: 182 - protein, 426 aa, Artificial Sequence
  Made in Lab - attenuated protein heterodimer construct
DVVMTQSPAFLSVTPGEKVTITCRASQSISDYLHWYQQKPDQAPKLLIKYASQSISGIPARFSGSGSGTDFTFTISSLEAEDAATYYCQNGHSFPLTFGQGTKLELKRTVAAPSVFIFPPSDEQLKSGTASVVCLLNNFYPREAKVQWKVDNALQSGNSQESVTEQDSKDSTYSLSSTLTLSKADYEKHKVYACEVTHQGLSSPVTKSFNRGECGGGGSGGGGSGGGGSRNLPVATPDPGMFPCLHHSQNLLRAVSNMLQKARQTLEFYPCTSEEIDHEDITKDKTSTVEACLPLELTKNESCLNSRETSFITNGSCLASRKTSFMMALCLSSIYEDLKMYQVEFKTMNAKLLMDPKRQIFLDQNMLAVIDELMQALNFNSETVPQKSSLEEPDFYKTKIKLCILLHAFRIRAVTIDRVMSYLNAS

SEQ ID NO: 183 - protein, 553 aa, Artificial Sequence
  Made in Lab - attenuated protein heterodimer construct
QVQLVQSGSELKKPGASVKVSCKASGYTFTNYDINWVRQAPGQGLEWMGWIFPGDESTQYNEKFKGRFVFSLDTSVSTAYLQISSLKAEDTAVYYCARQTTATWFAYWGQGTLVTVSASTKGPSVFPLAPSSKSTSGGTAALGCLVKDYFPEPVTVSWNSGALTSGVHTFPAVLQSSGLYSLSSVVTVPSSSLGTQTYICNVNHKPSNTKVDKKVEPKSCDKGGGGSGGGGSGGGGSGGGGSGGGGSIWELKKDVYVVELDWYPDAPGEMVVLTCDTPEEDGITWTLDQSSEVLGSGKTLTIQVKEFGDAGQYTCHKGGEVLSHSLLLLHKKEDGIWSTDILKDQKEPKNKTFLRCEAKNYSGRFTCWWLTTISTDLTFSVKSSRGSSDPQGVTCGAATLSAERVRGDNKEYEYSVECQEDSACPAAEESLPIEVMVDAVHKLKYENYTSSFFIRDIIKPDPPKNLQLKPLKNSRQVEVSWEYPDTWSTPHSYFSLTFSVQVQGKSKREKKDRVFTDKTSATVICRKNASISVRAQDRYYSSSWSEWASVPCS

SEQ ID NO: 184 - protein, 426 aa, Artificial Sequence; identical to SEQ ID NO: 182
  Made in Lab - attenuated protein heterodimer construct

SEQ ID NO: 185 - protein, 548 aa, Artificial Sequence
  Made in Lab - attenuated protein heterodimer construct
QVQLVQSGAEVKKPGASVKVSCKASGYTFTMNIIHWVRQAPGQGLEWMGWIHPGSGAIKYAQKLQGRVTMTTDTSTSTAYMELRSLRSDDTAVYYCARHGGTGRGAMDYWGQGTLVTVSSASTKGPSVFPLAPSSKSTSGGTAALGCLVKDYFPEPVTVSWNSGALTSGVHTFPAVLQSSGLYSLSSVVTVPSSSLGTQTYICNVNHKPSNTKVDKKVEPKSCDKGGGGSSGRSDNRGGGGSIWELKKDVYVVELDWYPDAPGEMVVLTCDTPEEDGITWTLDQSSEVLGSGKTLTIQVKEFGDAGQYTCHKGGEVLSHSLLLLHKKEDGIWSTDILKDQKEPKNKTFLRCEAKNYSGRFTCWWLTTISTDLTFSVKSSRGSSDPQGVTCGAATLSAERVRGDNKEYEYSVECQEDSACPAAEESLPIEVMVDAVHKLKYENYTSSFFIRDIIKPDPPKNLQLKPLKNSRQVEVSWEYPDTWSTPHSYFSLTFSVQVQGQDQDEKKDRVFTDKTSATVICRKNASISVRAQDRYYSSSWSEWASVPCS

SEQ ID NO: 186 - protein, 426 aa, Artificial Sequence
  Made in Lab - attenuated protein heterodimer construct
EIVLTQSPGTLSLSPGERATLSCRASQSVSTSAYSYMHWYQQKPGQAPRLLIYLASNLESGIPDRFSGSGSGTDFTLTISRLEPEDFAVYYCQQSRELPYTFGQGTKLEIKRTVAAPSVFIFPPSDEQLKSGTASVVCLLNNFYPREAKVQWKVDNALQSGNSQESVTEQDSKDSTYSLSSTLTLSKADYEKHKVYACEVTHQGLSSPVTKSFNRGECGGGGSPLGLAGRNLPVATPDPGMFPCLHHSQNLLRAVSNMLQKARQTLEFYPCTSEEIDHEDITKDKTSTVEACLPLELTKNESCLNSRETSFITNGSCLASRKTSFMMALCLSSIYEDLKMYQVEFKTMNAKLLMDPKRQIFLDQNMLAVIDELMQALNFNSETVPQKSSLEEPDFYKTKIKLCILLHAFRIRAVTIDRVMSYLNAS

SEQ ID NO: 187 - protein, 548 aa, Artificial Sequence; identical to SEQ ID NO: 185
  Made in Lab - attenuated protein heterodimer construct

SEQ ID NO: 188 - protein, 541 aa, Artificial Sequence
  Made in Lab - attenuated protein heterodimer construct
EVQLVESGGGLVQPGNSLRLSCAASGFTFSSFGMSWVRQAPGKGLEWVSSISGSGSDTLYADSVKGRFTISRDNAKTTLYLQMNSLRPEDTAVYYCTIGGSLSRSSQGTLVTVSSEIVLTQSPGTLSLSPGERATLSCRASQSVSTSAYSYMHWYQQKPGQAPRLLIYLASNLESGIPDRFSGSGSGTDFTLTISRLEPEDFAVYYCQQSRELPYTFGQGTKLEIKRTVAAPSVFIFPPSDEQLKSGTASVVCLLNNFYPREAKVQWKVDNALQSGNSQESVTEQDSKDSTYSLSSTLTLSKADYEKHKVYACEVTHQGLSSPVTKSFNRGECGGGGSPLGLAGRNLPVATPDPGMFPCLHHSQNLLRAVSNMLQKARQTLEFYPCTSEEIDHEDITKDKTSTVEACLPLELTKNESCLNSRETSFITNGSCLASRKTSFMMALCLSSIYEDLKMYQVEFKTMNAKLLMDPKRQIFLDQNMLAVIDELMQALNFNSETVPQKSSLEEPDFYKTKIKLCILLHAFRIRAVTIDRVMSYLNAS

SEQ ID NO: 189 - protein, 548 aa, Artificial Sequence
  Made in Lab - attenuated protein heterodimer construct
QVQLVQSGAEVKKPGASVKVSCKASGYTFTMNIIHWVRQAPGQGLEWMGWIHPGSGAIKYAQKLQGRVTMTTDTSTSTAYMELRSLRSDDTAVYYCARHGGTGRGAMDYWGQGTLVTVSSASTKGPSVFPLAPSSKSTSGGTAALGCLVKDYFPEPVTVSWNSGALTSGVHTFPAVLQSSGLYSLSSVVTVPSSSLGTQTYICNVNHKPSNTKVDKKVEPKSCDKGGGGSSGRSDNRGGGGSIWELKKDVYVVELDWYPDAPGEMVVLTCDTPEEDGITWTLDQSSEVLGSGKTLTIQVKEFGDAGQYTCHKGGEVLSHSLLLLHKKEDGIWSTDILKDQKEPKNKTFLRCEAKNYSGRFTCWWLTTISTDLTFSVKSSRGSSDPQGVTCGAATLSAERVRGDNKEYEYSVECQEDSACPAAEESLPIEVMVDAVHKLKYENYTSSFFIRDIIKPDPPKNLQLKPLKNSRQVEVSWEYPDTWSTPHSYFSLTFSVQVQGKSKREKKDRVFTDKTSATVICRKNASISVRAQDRYYSSSWSEWASVPCS

SEQ ID NO: 190 - protein, 426 aa, Artificial Sequence; identical to SEQ ID NO: 186
  Made in Lab - attenuated protein heterodimer construct

SEQ ID NO: 191 - protein, 548 aa, Artificial Sequence; identical to SEQ ID NO: 189
  Made in Lab - attenuated protein heterodimer construct

SEQ ID NO: 192 - protein, 541 aa, Artificial Sequence; identical to SEQ ID NO: 188
  Made in Lab - attenuated protein heterodimer construct

SEQ ID NO: 193 - protein, 1143 aa, Artificial Sequence
  Made in Lab - attenuated protein heterodimer construct
QVQLVQSGAEVKKPGASVKVSCKASGYTFTMNIIHWVRQAPGQGLEWMGWIHPGSGAIKYAQKLQGRVTMTTDTSTSTAYMELRSLRSDDTAVYYCARHGGTGRGAMDYWGQGTLVTVSSASTKGPSVFPLAPSSKSTSGGTAALGCLVKDYFPEPVTVSWNSGALTSGVHTFPAVLQSSGLYSLSSVVTVPSSSLGTQTYICNVNHKPSNTKVDKKVEPKSCDKGGGGSSGRSDNRGGGGSIWELKKDVYVVELDWYPDAPGEMVVLTCDTPEEDGITWTLDQSSEVLGSGKTLTIQVKEFGDAGQYTCHKGGEVLSHSLLLLHKKEDGIWSTDILKDQKEPKNKTFLRCEAKNYSGRFTCWWLTTISTDLTFSVKSSRGSSDPQGVTCGAATLSAERVRGDNKEYEYSVECQEDSAAPAAEESLPIEVMVDAVHKLKYENYTSSFFIRDIIKPDPPKNLQLKPLKNSRQVEVSWEYPDTWSTPHSYFSLTFSVQVQGQDQDEKKDRVFTDKTSATVICRKNASISVRAQDRYYSSSWSEWASVPCSGGGGSGGGGSDAHKSEVAHRFKDLGEENFKALVLIAFAQYLQQCPFEDHVKLVNEVTEFAKTCVADESAENCDKSLHTLFGDKLCTVATLRETYGEMADCCAKQEPERNECFLQHKDDNPNLPRLVRPEVDVMCTAFHDNEETFLKKYLYEIARRHPYFYAPELLFFAKRYKAAFTECCQAADKAACLLPKLDELRDEGKASSAKQRLKCASLQKFGERAFKAWAVARLSQRFPKAEFAEVSKLVTDLTKVHTECCHGDLLECADDRADLAKYICENQDSISSKLKECCEKPLLEKSHCIAEVENDEMPADLPSLAADFVESKDVCKNYAEAKDVFLGMFLYEYARRHPDYSVVLLLRLAKTYETTLEKCCAAADPHECYAKVFDEFKPLVEEPQNLIKQNCELFEQLGEYKFQNALLVRYTKKVPQVSTPTLVEVSRNLGKVGSKCCKHPEAKRMPCAEDYLSVVLNQLCVLHEKTPVSDRVTKCCTESLVNRRPCFSALEVDETYVPKEFNAETFTFHADICTLSEKERQIKKQTALVELVKHKPKATKEQLKAVMDDFAAFVEKCCKADDKETCFAEEGKKLVAASQAALGL

SEQ ID NO: 194 - protein, 426 aa, Artificial Sequence; identical to SEQ ID NO: 154
  Made in Lab - attenuated protein heterodimer construct

SEQ ID NO: 195 - protein, 1151 aa, Artificial Sequence
  Made in Lab - attenuated protein heterodimer construct
QVQLVQSGAEVKKPGSSVKVSCKTSGDTFSTYAISWVRQAPGQGLEWMGGIIPIFGKAHYAQKFQGRVTITADESTSTAYMELSSLRSEDTAVYFCARKFHFVSGSPFGMDVWGQGTTVTVSSASTKGPSVFPLAPSSKSTSGGTAALGCLVKDYFPEPVTVSWNSGALTSGVHTFPAVLQSSGLYSLSSVVTVPSSSLGTQTYICNVNHKPSNTKVDKKVEPKSCDKGGSPLGLAGLSGRSDNRGGGGSIWELKKDVYVVELDWYPDAPGEMVVLTCDTPEEDGITWTLDQSSEVLGSGKTLTIQVKEFGDAGQYTCHKGGEVLSHSLLLLHKKEDGIWSTDILKDQKEPKNKTFLRCEAKNYSGRFTCWWLTTISTDLTFSVKSSRGSSDPQGVTCGAATLSAERVRGDNKEYEYSVECQEDSAAPAAEESLPIEVMVDAVHKLKYENYTSSFFIRDIIKPDPPKNLQLKPLKNSRQVEVSWEYPDTWSTPHSYFSLTFSVQVQGQDQDEKKDRVFTDKTSATVICRKNASISVRAQDRYYSSSWSEWASVPCSGGGGSGGGGSDAHKSEVAHRFKDLGEENFKALVLIAFAQYLQQCPFEDHVKLVNEVTEFAKTCVADESAENCDKSLHTLFGDKLCTVATLRETYGEMADCCAKQEPERNECFLQHKDDNPNLPRLVRPEVDVMCTAFHDNEETFLKKYLYEIARRHPYFYAPELLFFAKRYKAAFTECCQAADKAACLLPKLDELRDEGKASSAKQRLKCASLQKFGERAFKAWAVARLSQRFPKAEFAEVSKLVTDLTKVHTECCHGDLLECADDRADLAKYICENQDSISSKLKECCEKPLLEKSHCIAEVENDEMPADLPSLAADFVESKDVCKNYAEAKDVFLGMFLYEYARRHPDYSVVLLLRLAKTYETTLEKCCAAADPHECYAKVFDEFKPLVEEPQNLIKQNCELFEQLGEYKFQNALLVRYTKKVPQVSTPTLVEVSRNLGKVGSKCCKHPEAKRMPCAEDYLSVVLNQLCVLHEKTPVSDRVTKCCTESLVNRRPCFSALEVDETYVPKEFNAETFTFHADICTLSEKERQIKKQTALVELVKHKPKATKEQLKAVMDDFAAFVEKCCKADDKETCFAEEGKKLVAASQAALGL

SEQ ID NO: 196 - protein, 415 aa, Artificial Sequence; identical to SEQ ID NO: 156
  Made in Lab - attenuated protein heterodimer construct

SEQ ID NO: 197 - protein, 1145 aa, Artificial Sequence
  Made in Lab - attenuated protein heterodimer construct
QVQLVQSGSELKKPGASVKVSCKASGYTFTNYDINWVRQAPGQGLEWMGWIFPGDESTQYNEKFKGRFVFSLDTSVSTAYLQISSLKAEDTAVYYCARQTTGTWFAYWGQGTLVTVSASTKGPSVFPLAPSSKSTSGGTAALGCLVKDYFPEPVTVSWNSGALTSGVHTFPAVLQSSGLYSLSSVVTVPSSSLGTQTYICNVNHKPSNTKVDKKVEPKSCDKGGSPLGLAGLSGRSDNRGGGGSIWELKKDVYVVELDWYPDAPGEMVVLTCDTPEEDGITWTLDQSSEVLGSGKTLTIQVKEFGDAGQYTCHKGGEVLSHSLLLLHKKEDGIWSTDILKDQKEPKNKTFLRCEAKNYSGRFTCWWLTTISTDLTFSVKSSRGSSDPQGVTCGAATLSAERVRGDNKEYEYSVECQEDSAAPAAEESLPIEVMVDAVHKLKYENYTSSFFIRDIIKPDPPKNLQLKPLKNSRQVEVSWEYPDTWSTPHSYFSLTFSVQVQGQDQDEKKDRVFTDKTSATVICRKNASISVRAQDRYYSSSWSEWASVPCSGGGGSGGGGSDAHKSEVAHRFKDLGEENFKALVLIAFAQYLQQCPFEDHVKLVNEVTEFAKTCVADESAENCDKSLHTLFGDKLCTVATLRETYGEMADCCAKQEPERNECFLQHKDDNPNLPRLVRPEVDVMCTAFHDNEETFLKKYLYEIARRHPYFYAPELLFFAKRYKAAFTECCQAADKAACLLPKLDELRDEGKASSAKQRLKCASLQKFGERAFKAWAVARLSQRFPKAEFAEVSKLVTDLTKVHTECCHGDLLECADDRADLAKYICENQDSISSKLKECCEKPLLEKSHCIAEVENDEMPADLPSLAADFVESKDVCKNYAEAKDVFLGMFLYEYARRHPDYSVVLLLRLAKTYETTLEKCCAAADPHECYAKVFDEFKPLVEEPQNLIKQNCELFEQLGEYKFQNALLVRYTKKVPQVSTPTLVEVSRNLGKVGSKCCKHPEAKRMPCAEDYLSVVLNQLCVLHEKTPVSDRVTKCCTESLVNRRPCFSALEVDETYVPKEFNAETFTFHADICTLSEKERQIKKQTALVELVKHKPKATKEQLKAVMDDFAAFVEKCCKADDKETCFAEEGKKLVAASQAALGL

SEQ ID NO: 198 - protein, 416 aa, Artificial Sequence; identical to SEQ ID NO: 160
  Made in Lab - attenuated protein heterodimer construct

1. An attenuated protein homodimer, comprising a first polypeptide and a second polypeptide, wherein:
the first and the second polypeptide comprise, in an N- to C-terminal orientation, a region of an immunoglobulin antigen binding domain (ABD), an IL-12A (p35) protein, a linker, and an IL-12B (p40) protein,
wherein the ABD specifically binds to a cell surface protein expressed on a cell, a plasma protein, or an extracellular matrix (ECM) protein, wherein the IL-12A protein of the first polypeptide is bound to the IL-12B protein of the second polypeptide, and wherein the IL-12B protein of the first polypeptide is bound to the IL-12A protein of the second polypeptide, wherein said binding partially masks a binding site of IL-12 protein(s) that otherwise binds to an IL-12Rβ1/IL-12Rβ2 receptor complex on the surface of an immune cell in vitro or in vivo and attenuates or reduces at least one IL-12 signaling activity of the homodimer relative to wild-type IL-12.

2. The attenuated protein homodimer of claim 1, wherein the cell surface protein is inducible and co-expressed on an immune cell with the IL-12Rβ1/IL-12Rβ2 receptor complex, or wherein the plasma protein is selected from albumins, globulins, fibrinogens, and clotting factors, or wherein the ECM protein is selected from collagens, elastins, fibronectin, and laminins.

3. The attenuated protein homodimer of claim 1 or 2, wherein the cell surface protein is selected from Programmed cell death protein 1 (PD-1), Programmed death-ligand 1 (PD-L1), B7H3 (CD276), T cell immunoreceptor with Ig and ITIM domains (TIGIT), T-cell immunoglobulin and mucin-domain containing-3 (TIM-3), NKG2D, 4-1BB (CD137), CD3, CD4, CD8, CD25, CD70.

4. The attenuated protein homodimer of any one of claims 1-3, wherein the ABD comprises a (i) variable heavy chain (VH) region and a CH1 region, and (ii) a variable light chain (VL) region and a CL region, optionally wherein the CH1 region and the CL region are bound together via a disulfide bond.

5. The attenuated protein homodimer of claim 4, wherein the C-terminus of the CH1 region is fused to the N-terminus of the p35 protein, optionally via a linker, and wherein the VL/CL region is a separate polypeptide chain that is bound to the VH/CH1 region via the disulfide bond.

6. The attenuated protein homodimer of claim 4, wherein the C-terminus of the CL region is fused to the N-terminus of the p35 protein, optionally via a linker, and wherein the VH/CH1 region is a separate polypeptide chain that is bound to the VL/CL region via the disulfide bond.

7. The attenuated protein homodimer of any one of claims 1-6, wherein the first and second p35 proteins comprise, consist, or consist essentially of an amino acid sequence that is at least 80, 85, 90, 95, 98, or 100% identical to an amino acid sequence selected from Table S1, optionally wherein the p35 protein is a variant that comprises or retains an amino acid substitution at C74 and/or S197, as defined by the mature p35 sequence, optionally C74A or C74S and/or S197A.

8. The attenuated protein homodimer of any one of claims 1-7, wherein the first and second p40 proteins comprise, consist, or consist essentially of an amino acid sequence that is at least 80, 85, 90, 95, 98, or 100% identical to an amino acid sequence selected from Table S2, optionally wherein the p40 protein is a variant that comprises or retains amino acid substitutions at any one or more of Y144, C177, C252, K258, 5259, K260, R261, and/or D290, including combinations thereof, as defined by the mature p40 sequence, including any one or more of Y144F, C177A, C252S, K258Q, S259D, K260Q, R261D, and/or D290A, optionally a QDQD substitution at residues K258-R261.

9. The attenuated protein homodimer of any one of claims 1-8, wherein the linker is a flexible linker, optionally a stable or non-cleavable linker.

10. The attenuated protein homodimer of any one of claims 1-9, wherein the linker is about 1-50, 1-40, 1-30, 1-20, 1-10, 1-5, 1-4, 1-3 amino acids in length, or about 1, 2, 3, 4, 5, 6, 7, 8, 9, 10, 11, 12, 13, 14, 15, 16, 17, 18, 19, 20, 21, 22, 23, 24, 25, 26, 27, 28, 29, 30, 31, 32, 33, 34, 35, 36, 37, 38, 39, 40, 41, 42, 43, 44, 45, 46, 47, 48, 49, 50 amino acids in length.

11. The attenuated protein homodimer any one of claims 1-10, wherein the linker is selected from Table L1 or Table L2.

12. The attenuated protein homodimer any one of claims 1-11, wherein the immune cell is selected from one or more of a T cell, a B cell, a natural killer (NK) cell, a monocyte, and a macrophage.

13. The attenuated protein homodimer of claim 12, wherein the immune cell is an exhausted T cell or an exhausted NK cell.

14. The attenuated protein homodimer of any one of claims 1-13, wherein the first polypeptide and the second polypeptide comprise, consist, or consist essentially of an amino acid sequence that is at least 80, 85, 90, 95, 98, or 100% identical to a sequence selected from Table S3, optionally wherein the attenuated proprotein homodimer comprises chains 3 and 4 selected from Table S3, optionally, wherein the VL/CL region is a separate polypeptide chain that is bound to the VH/CH1 region via the disulfide bond, or wherein the VH/CH1 region is a separate polypeptide chain that is bound to the VL/CL region via the disulfide bond.

15. The attenuated protein homodimer of any one of claims 1-14, wherein binding of the ABD to the cell surface protein increases binding (avidity) of the IL-12 protein(s) in the homodimer to the IL-12Rβ1/IL-12Rβ2 receptor complex on the surface of an immune cell in vitro or in vivo, and thereby increases at least one IL-12 signaling activity of the homodimer.

16. The attenuated protein homodimer of claim 15, wherein binding of the ABD to the cell surface protein increases binding (avidity) of the IL-12 protein(s) in the homodimer to the IL-12Rβ1/IL-12Rβ2 receptor complex by about or at least about 10%, 20%, 30%, 40%, 50%, 60%, 70%, 80%, 90%, 100%, 200%, 300%, 400%, 500%, 1000%, 2000%, 3000%, 4000%, or 5000% or more.

17. The attenuated protein homodimer of claim 15 or 16, wherein binding of the ABD to the cell surface protein increases at least one IL-12 signaling activity of the homodimer by about or at least about 10%, 20%, 30%, 40%, 50%, 60%, 70%, 80%, 90%, 100%, 200%, 300%, 400%, 500%, 1000%, 2000%, 3000%, 4000%, or 5000% or more.

18. The attenuated protein homodimer of any one of claims 1-17, wherein the at least one IL-12 signaling activity is selected from one or more of stimulating growth and function of T cells, enhancing cytotoxic activity of NK cells and/or CD8+ T cells, stimulating production of interferon-γ (IFN-γ) and/or tumor necrosis factor-a (TNF-α), and inhibiting angiogenesis.

19. The attenuated protein homodimer of any one of claims 1-18, which is substantially in homodimeric form in a physiological solution, or under physiological conditions, optionally in vivo conditions.

20. An attenuated protein heterodimer, comprising a first polypeptide and a second polypeptide, wherein:
(a) the first polypeptide comprises, in an N- to C-terminal orientation, a variable heavy chain (VH) region and a CH1 region, an optional linker, and an IL-12A (p35) protein, and the second polypeptide comprises, in an N- to C-terminal orientation, a variable light chain (VL) region and a CL region, an optional linker, and an IL-12B (p40) protein, wherein the p35 protein of the first polypeptide is bound to the p40 protein of the second polypeptide; or
(b) the first polypeptide comprises, in an N- to C-terminal orientation, a variable heavy chain (VH) region and a CH1 region, an optional linker, and an IL-12B (p40) protein, and the second polypeptide comprises, in an N- to C-terminal orientation, a variable light chain (VL) region and a CL region, an optional linker, and an IL-12A (35) protein, wherein the p40 protein of the first polypeptide is bound to the p35 protein of the second polypeptide,
wherein the CH1 region and the CL region of (a) or (b) are bound together via a disulfide bond to form an immunoglobulin antigen binding domain (ABD), wherein the ABD specifically binds to a cell surface protein expressed on a cell, a plasma protein, or an extracellular matrix (ECM) protein, and wherein at least one of the p35 and/or the p40 protein is a variant that has one or more amino acid alterations relative to a wild-type p35 or p40 sequence, and which has reduced binding affinity to a wild-type IL-12Rβ1/IL-12Rβ2 receptor complex on the surface of an immune cell in vitro or in vivo relative to that of the wild-type p35 and/or p40 sequence.

21. The attenuated protein heterodimer of claim 20, wherein the cell surface protein is inducible and co-expressed on the immune cell with the IL-12Rβ1/IL-12Rβ2 receptor complex, or wherein the plasma protein is selected from albumins, globulins, fibrinogens, and clotting factors, or wherein the ECM protein is selected from collagens, elastins, fibronectin, and laminins.

22. The attenuated protein heterodimer of claim 20 or 21, wherein the cell surface protein is selected from Programmed cell death protein 1 (PD-1), Programmed death-ligand 1 (PD-L1), B7H3 (CD276), T cell immunoreceptor with Ig and ITIM domains (TIGIT), T-cell immunoglobulin and mucin-domain containing-3 (TIM-3), NKG2D, 4-1BB (CD137), CD3, CD4, CD8, CD25, and CD70.

23. The attenuated protein heterodimer of any one of claims 20-22, wherein the p35 protein is a variant that has reduced binding affinity to wild-type IL-12Rβ1/IL-12Rβ2 receptor complex of about or at least about 2-fold, 5-fold, 10-fold, 50-fold, 100-fold, 1000-fold or more, relative to the binding affinity of the wild-type p35 sequence.

24. The attenuated protein heterodimer of claim 23, wherein the p35 protein has an amino acid substitution at any one or more of Y167, E38, F39, P41, K128, F166, and/or D188, as defined by the mature p35 sequence, optionally selected from any one or more of:
a Y167A, Y167D, Y167E, Y167F, Y167G, Y167H, Y167I, Y167L, Y167N, Y167Q, Y167S, Y167T, or Y167V substitution;
a E38A, E38D, E38F, E38G, E38H, E38I, E38K, E38L, E38M, E38N, E38P, E38Q, E38R, E38S, E38T, E38V, or E38W substitution;
a F39A, F39D, F39E, F39G, F39H, F39I, F39K, F39L, F39M, F39N, F39P, F39Q, F39R, F39S, F39T, F39V, F39W, or F39Y substitution;
a P41A, P41D, P41E, P41F, P41G, P41H, P41I, P41K, P41L, P41M, P41N, P41Q, P41R, P41S, P41T, P41V, P41W, or P41Y substitution;
a K128A, K128D, K128E, K128F, K128G, K128H, K128I, K128L, K128M, K128N, K128P, K128Q, K128R, K128S, K128T, K128V, K128W, or K128Y substitution;
a F166A, F166D, F166E, F166G, F166H, F166I, F166K, F166L, F166M, F166N, F166P, F166Q, F166R, F166S, F166T, F166V, F166W, or F166Y substitution; and
a D188A substitution, including any combination of the foregoing.

25. The attenuated protein heterodimer of any one of claims 20-24, wherein the p35 protein comprises, consists, or consists essentially of an amino acid sequence that is at least 80, 85, 90, 95, 98, or 100% identical to an amino acid sequence selected from Table S1, optionally wherein the p35 protein is a variant that comprises or retains the acid substitution at Y167, and/or comprises or retains an amino acid substitution at C74 and/or S197, as defined by the mature p35 sequence, optionally C74A or C74S and/or S197A.

26. The attenuated protein heterodimer of any one of claims 20-25, wherein the p40 protein is a variant that has reduced binding affinity to wild-type IL-12Rβ1/IL-12Rβ2 receptor complex of about or at least about 2-fold, 5-fold, 10-fold, 50-fold, 100-fold, 1000-fold or more, relative to the binding affinity of the wild-type p40 sequence.

27. The attenuated protein heterodimer of claim 26, wherein the p40 protein has an amino acid substitution at any one or more of D18, E59, K99, and/or K264, as defined by the mature p40 sequence.

28. The attenuated protein heterodimer of any one of claims 20-27, wherein the p40 protein comprises, consists, or consists essentially of an amino acid sequence that is at least 80, 85, 90, 95, 98, or 100% identical to an amino acid sequence selected from Table S2, optionally wherein the p40 protein is a variant that comprises or retains amino acid substitutions at any one or more of Y144, C177, C252, K258, 5259, K260, R261, and/or D290, including combinations thereof, as defined by the mature p40 sequence, including any one or more of Y144F, C177A, C252S, K258Q, S259D, K260Q, R261D, and/or D290A, optionally a QDQD substitution at residues K258-R261.

29. The attenuated protein heterodimer of any one of claims 20-28, wherein the linker is a flexible linker, optionally a stable or non-cleavable linker.

30. The attenuated protein heterodimer any one of claims 20-29, wherein the linker is about 1-50, 1-40, 1-30, 1-20, 1-10, 1-5, 1-4, 1-3 amino acids in length, or about 1, 2, 3, 4, 5, 6, 7, 8, 9, 10, 11, 12, 13, 14, 15, 16, 17, 18, 19, 20, 21, 22, 23, 24, 25, 26, 27, 28, 29, 30, 31, 32, 33, 34, 35, 36, 37, 38, 39, 40, 41, 42, 43, 44, 45, 46, 47, 48, 49, 50 amino acids in length.

31. The attenuated protein heterodimer any one of claims 20-30, wherein the linker is selected from Table L1 or Table L2.

32. The attenuated protein heterodimer of any one of claims 20-31, comprising four polypeptides selected from:
(i) two of the first and second polypeptides of (a); and
(ii) two of the first and second polypeptides of (b),
wherein the four polypeptides are bound together to form an attenuated protein tetramer, optionally wherein the linkers are about or less than about 1, 2, 3, 4, 5, 6, 7, 8, 9, or 10 amino acids in length.

33. The attenuated protein heterodimer any one of claims 20-32, wherein the immune cell is selected from one or more of a T cell, a B cell, a natural killer (NK) cell, a monocyte, and a macrophage.

34. The attenuated protein heterodimer of claim 33, wherein the immune cell is an exhausted T cell or an exhausted NK cell.

35. The attenuated protein heterodimer of any one of claims 20-34, wherein the first polypeptide comprises, consists, or consists essentially of an amino acid sequence that is at least 80, 85, 90, 95, 98, or 100% identical to a sequence selected from Table S4, wherein the second polypeptide comprises, consists, or consists essentially of an amino acid sequence that is at least 80, 85, 90, 95, 98, or 100% identical to a sequence selected from Table S4.

36. The attenuated protein heterodimer of any one of claims 20-35, wherein binding of the ABD to the cell surface protein increases binding (avidity) of the IL-12 protein(s) in the heterodimer to the IL-12Rβ1/IL-12Rβ2 receptor complex on the surface of the immune cell in vitro or in vivo, and thereby increases at least one IL-12 signaling activity of the heterodimer.

37. The attenuated protein heterodimer of claim 36, wherein binding of the ABD to the cell surface protein increases binding (avidity) of the IL-12 protein(s) in the heterodimer to the IL-12Rβ1/IL-12Rβ2 receptor complex by about or at least about 10%, 20%, 30%, 40%, 50%, 60%, 70%, 80%, 90%, 100%, 200%, 300%, 400%, 500%, 1000%, 2000%, 3000%, 4000%, or 5000% or more.

38. The attenuated protein heterodimer of claim 36 or 37, wherein binding of the ABD to the cell surface protein increases at least one IL-12 signaling activity of the heterodimer by about or at least about 10%, 20%, 30%, 40%, 50%, 60%, 70%, 80%, 90%, 100%, 200%, 300%, 400%, 500%, 1000%, 2000%, 3000%, 4000%, or 5000% or more.

39. The attenuated protein heterodimer of any one of claims 20-38, wherein the at least one IL-12 signaling activity is selected from one or more of stimulating growth and function of T cells, enhancing cytotoxic activity of NK cells and/or CD8+ T cells, stimulating production of interferon-γ (IFN-γ) and/or tumor necrosis factor-α (TNF-α), and inhibiting angiogenesis.

40. The attenuated protein heterodimer of any one of claims 20-39, which is substantially in homodimeric form in a physiological solution, or under physiological conditions, optionally in vivo conditions.

41. One or more isolated recombinant nucleic acid molecules encoding the first and second polypeptide of the attenuated protein homodimer of any one of claims 1-19, and optionally the VL/CL region and/or the VH/CH1 region of claim 5 or 6 as a separate polypeptide chain, one or more vectors comprising the recombinant nucleic acid molecules, or one or more host cells comprising the one or more vectors.

42. A method of producing an attenuated protein homodimer of any one of claims 1-19, comprising culturing the one or more host cells of claim 40 under culture conditions suitable for the expression of the attenuated protein homodimer, and isolating the attenuated protein homodimer from the culture.

43. One or more isolated recombinant nucleic acid molecules encoding the first and second polypeptide of the attenuated protein heterodimer of any one of claims 20-40, one or more vectors comprising the recombinant nucleic acid molecules, or one or more host cells comprising the one or more vectors.

44. A method of producing an attenuated protein heterodimer of any one of claims 20-40, comprising
(a) culturing the one or more host cells of claim 43 under culture conditions suitable for the expression of the attenuated protein heterodimer, and isolating the attenuated protein heterodimer from the culture; or
(b) culturing a host cell of claim 43 that expresses the first polypeptide of the heterodimer, culturing a separate host cell of claim 43 that expresses the second polypeptide of the heterodimer, isolating the first and second polypeptides from each separate host cell, and combining the first and second polypeptides to produce the attenuated protein heterodimer.

45. An isolated human IL-12A (p35) protein variant, which comprises, consists, or consists essentially of an amino acid sequence that is at least 80, 85, 90, 95, 98, or 100% identical to the amino acid sequence set forth in SEQ ID NO: 1 or 2, and which has an amino acid substitution at any one or more of E38, F39, P41, C74, K128, F166, Y167, S197, and/or D188, as defined by the mature p35 sequence.

46. The isolated human p35 protein variant of claim 45, which has an amino acid substitution selected from any one or more of:
a Y167A, Y167D, Y167E, Y167F, Y167G, Y167H, Y167I, Y167L, Y167N, Y167Q, Y167S, Y167T, or Y167V substitution;
a E38A, E38D, E38F, E38G, E38H, E38I, E38K, E38L, E38M, E38N, E38P, E38Q, E38R, E38S, E38T, E38V, or E38W substitution;
a F39A, F39D, F39E, F39G, F39H, F39I, F39K, F39L, F39M, F39N, F39P, F39Q, F39R, F39S, F39T, F39V, F39W, or F39Y substitution;
a P41A, P41D, P41E, P41F, P41G, P41H, P41I, P41K, P41L, P41M, P41N, P41Q, P41R, P41S, P41T, P41V, P41W, or P41Y substitution;
a K128A, K128D, K128E, K128F, K128G, K128H, K128I, K128L, K128M, K128N, K128P, K128Q, K128R, K128S, K128T, K128V, K128W, or K128Y substitution;
a F166A, F166D, F166E, F166G, F166H, F166I, F166K, F166L, F166M, F166N, F166P, F166Q, F166R, F166S, F166T, F166V, F166W, or F166Y substitution; and
a D188A substitution, including any combination of the foregoing.

47. The isolated p35 protein variant of claim 45 or 46, which has reduced binding affinity to wild-type IL-12Rβ31/IL-12Rβ2 receptor complex of about or at least about 2-fold, 5-fold, 10-fold, 50-fold, 100-fold, 1000-fold or more, relative to the binding affinity of the wild-type p35 sequence.

48. An isolated recombinant nucleic acid molecule encoding the human IL-12A (p35) protein variant of any one of claims 45-47, a vector comprising the recombinant nucleic acid molecule, a host cell comprising the vector.

49. A method of producing the human IL-12A (p35) protein variant of any one of claims 45-47, comprising culturing the host cell of claim 48 under culture conditions suitable for the expression of the p35 protein variant, and isolating the p35 protein variant from the culture.

45. A pharmaceutical composition, comprising a pharmaceutically acceptable carrier and the attenuated protein homodimer of any one of claims 1-19, or the attenuated protein heterodimer of any one of claims 20-40.

46. A method of treating disease in a subject, and/or a method of enhancing an immune response in a subject, comprising administering to the subject a therapeutically effective amount of the pharmaceutical composition of claim 45.

47. The method of claim 46, wherein the disease is selected from one or more of a cancer, a viral infection, and an immune disorder.

48. The method of claim 47, wherein the cancer is a primary cancer or a metastatic cancer, and is selected from one or more of melanoma (optionally metastatic melanoma), kidney cancer (optionally renal cell carcinoma), pancreatic cancer, bone cancer, prostate cancer, small cell lung cancer, non-small cell lung cancer (NSCLC), mesothelioma, leukemia (optionally lymphocytic leukemia, chronic myelogenous leukemia, acute myeloid leukemia, or relapsed acute myeloid leukemia), multiple myeloma, lymphoma, hepatoma (hepatocellular carcinoma), sarcoma, B-cell malignancy, breast cancer, ovarian cancer, colorectal cancer, glioma, glioblastoma multiforme, meningioma, pituitary adenoma, vestibular schwannoma, primary CNS lymphoma, primitive neuroectodermal tumor (medulloblastoma), bladder cancer, uterine cancer, esophageal cancer, brain cancer, head and neck cancers, cervical cancer, testicular cancer, thyroid cancer, and stomach cancer.

49. The method of any one of claims 45-48, wherein following administration, the attenuated protein homodimer or heterodimer is activated through binding of the ABD to the cell surface receptor on an immune cell in vivo, optionally in a tumor microenvironment, which increases binding (avidity) of the IL-12 protein(s) to the IL-12Rβ1/IL-12Rβ2 receptor complex on the surface of the immune cell, and thereby increases at least one IL-12 signaling activity.

50. The method of claim 49, wherein the immune cell is selected from one or more of a T cell, a B cell, a natural killer cell, a monocyte, and a macrophage.

51. The method of claim 50, wherein the immune cell is an exhausted T cell or an exhausted NK cell.

52. The method of any one of claims 45-51, wherein administration of the attenuated protein homodimer or heterodimer increases an immune response in the subject by about or at least about 5, 10, 15, 20, 25, 30, 35, 40, 45, 50, 60, 70, 80, 90, 100, 200, 300, 400, 500, 600, 700, 800, 900, 1000, 2000% or more, relative to a control, optionally wherein the immune response is an anti-cancer or anti-viral immune response.

53. The method of any one of claims 45-52, wherein administration of the attenuated protein homodimer or heterodimer increases cell-killing in the subject by about or at least about 5, 10, 15, 20, 25, 30, 35, 40, 45, 50, 60, 70, 80, 90, 100, 200, 300, 400, 500, 600, 700, 800, 900, 1000, 2000% or more, relative to a control, optionally wherein the cell-killing is cancer cell-killing or virally-infected cell-killing.

54. The method of any one of claims 46-53, wherein the viral infection is selected from one or more of human immunodeficiency virus (HIV), Hepatitis A, Hepatitis B, Hepatitis C, Hepatitis E, Caliciviruses associated diarrhoea, Rotavirus diarrhoea, Haemophilus influenzae B pneumonia and invasive disease, influenza, measles, mumps, rubella, Parainfluenza associated pneumonia, Respiratory syncytial virus (RSV) pneumonia, Severe Acute Respiratory Syndrome (SARS), Human papillomavirus, Herpes simplex type 2 genital ulcers, Dengue Fever, Japanese encephalitis, Tick-borne encephalitis, West-Nile virus associated disease, Yellow Fever, Epstein-Barr virus, Lassa fever, Crimean-Congo haemorrhagic fever, Ebola haemorrhagic fever, Marburg haemorrhagic fever, Rabies, Rift Valley fever, Smallpox, upper and lower respiratory infections, and poliomyelitis, optionally wherein the subject is HIV-positive.

55. The method of any one of claims 46-54, wherein the immune disorder is selected from one or more of type 1 diabetes, vasculitis, and an immunodeficiency.

56. The method of any one of claims 45-55, wherein the pharmaceutical composition is administered to the subject by parenteral administration.

57. The method of claim 56, wherein the parenteral administration is intravenous administration.

58. Use of a pharmaceutical composition of claim 45 in the preparation of a medicament for treating a disease in a subject, and/or for enhancing an immune response in a subject.

59. A pharmaceutical composition of claim 45 for use in treating a disease in a subject, and/or for enhancing an immune response in a subject.
